(19) United States
(12) Patent Application Publication
(10) Pub. No.: US 2022/0220441 A1
(43) Pub. Date: Jul. 14, 2022

(54) RAPID AND DETERMINISTIC GENERATION OF MICROGLIA FROM HUMAN PLURIPOTENT STEM CELLS

(71) Applicant: Westfälische Wilhelms-Universität Münster, Munster (DE)

(72) Inventors: Matthias Pawlowski, Munster (DE); Anna Martina Speicher, Osnabrock (DE)

(21) Appl. No.: 17/613,927

(22) PCT Filed: May 27, 2020
(86) PCT No.: PCT/EP2020/064649

§ 371 Date: Nov. 23, 2021

(30) Foreign Application Priority Data
May 27, 2019 (EP) 19176722.7

(51) Int. Cl. C12N 5/079; C07K 14/53; C07K 14/54

(52) U.S. Cl. CPC C12N 5/0622; C07K 14/53; C07K 14/54; C12N 2506/45; C12N 2501/22; C12N 2501/2334; C12N 2502/08; C12N 2830/003

(57) ABSTRACT

The present invention relates to a method for the production of microglia from stem cells comprising the steps of a) targeted insertion of a nucleotide sequence encoding a transcriptional regulator protein into a first genomic safe harbour site; and b) targeted insertion of the coding sequence of the transcription factor PU.1 (SEQ ID NO: 1) into a second genomic safe harbour site, wherein the gene is operably linked to an inducible promoter, which is regulated by the transcriptional regulator protein; expression of PU.1 (SEQ ID NO: 2); and culturing the stem cells received from steps a) and b) with exposure to at least one growth factor or small molecule that mimics signaling during at least one stage of embryonic development of microglia or adult microglia proliferation, differentiation or polarization. Further, the present invention relates to the microglia obtained by the methods of the present invention and various uses thereof.

### FIELD OF THE INVENTION

[0001] The present invention relates to a method for the production of microglia from stem cells comprising the steps of targeted insertion of a nucleotide sequence encoding a transcriptional regulator protein into a first genomic safe harbour site; and targeted insertion of the coding sequence of the transcription factor PU.1 into a second genomic safe harbour site, wherein the gene is operably linked to an inducible promoter, which is regulated by the transcriptional regulator protein; expression of PU.1; and culturing the stem cells received from steps a) and b) with exposure to at least one growth factor or small molecule that recapitulates signaling during at least one stage of embryonic development of microglia or adult microglia proliferation, differentiation or polarization. Further, the present invention relates to the microglia obtained by the methods of the present invention and various uses thereof.

### BACKGROUND OF THE INVENTION

[0002] Microglia are the resident immune cells in the central nervous system (CNS) [Schafer et al., 2015]. They originate from early yolk sac macrophages that arise during the first wave of primitive haematopoiesis in early embryonic development. Primitive yolk sac macrophages spread through the blood stream as soon as the circulatory system is established to populate the developing CNS. In contrast to tissue-resident macrophages in other organs, microglia are not replaced by foetal monocytes during later stages of embryonic development [McGrath et al., 303; Ginhoux et al., 2010; Gomez Perdiguero et al., 2015]. After establishing the microglial population during early embryonic development, microglia are self-maintained throughout life by local proliferation, not replaced by bone-marrow-derived cells [Réu et al., 2017]. Microglia are uniformly distributed throughout the brain and spinal cord and play crucial roles in the development, maintenance, plasticity and defence of the CNS [Schafer et al., 2015]. In the healthy CNS, “resting” homeostatic microglia are highly ramified cells with a small cell body and fine cellular processes. These microglial processes are motile and continuously sampling their environment to scan for signals of internal or external danger (such as invading pathogens or signals generated locally by damaged or dying cells). Detection of such signals leads to microglial activation, which comprises profound changes in microglial morphology, gene expression, and function. Upon activation, microglia retract their processes and revert to an amoeboid-like appearance. They actively migrate to CNS lesions following chemotactic gradients and secrete inflammatory cytokines.

[0003] Through a large repertoire of cell surface receptors, including neurotransmitter and cytokine receptors, they communicate with neurons, other glial cells, and peripheral immune system cells [Kettenmann et al., 2011]. In light of their versatile functions and their unique position as representatives of the immune system in the healthy CNS, it is not surprising that microglia have been implicated in the onset and progression of many neurological diseases [Ransohoff et al., 2016].

[0004] Most recently, single cell transcriptomic profiling of microglia in mouse models of Alzheimer's disease (AD) and other neurodegenerative diseases including ageing, amyotrophic lateral sclerosis or tauopathy-related frontotemporal lobar degeneration (FTLD-tau), have revealed a pro-inflammatory transcriptomic signature in a small subset of microglia termed microglial neurodegenerative phenotype (MGnD) [Krasemann et al., 2017] or disease-associated microglia (DAM) [Keren-Saul et al., 2017]. The microglial switch from a homeostatic towards a disease-associated phenotype is thought to occur in response to altered brain homeostasis in neurodegeneration and is dependent on unique temporally and spatially controlled transcriptional programmes [Krasemann et al., 2017; Keren-Shaul et al., 2017; Butovsky et al., 1998]. In most cases, it remains unclear whether these cells have a protective or disease-inducing/propagating function. Access to human microglia in vitro and in vivo, in health and disease, would facilitate the identification of factors associated with both their beneficial and detrimental functions and the development of strategies to restore the homeostatic microglial signature or to induce the DAM microglial signature. This could allow us to target microglia for the treatment of neurodegenerative diseases.

[0005] The isolation or in vitro derivation of many human cell types remains challenging and inefficient. Especially cells of the human CNS, including microglia, are particularly difficult to obtain. In the past, low-efficient isolation from neurosurgical specimen or post-mortem brain tissue represented the only access route. Human pluripotent stem cells (hPSCs) represent an unlimited and renewable source from which, in theory, all cell types of the human organism can be produced [Thomson et al., 1998]. The ground-breaking discovery that human skin fibroblasts can be readily converted into human induced pluripotent stem cells (hiPSCs) that exhibit the same properties as embryonic stem cells, allows the generation of autologous and bespoke cell types for applications in regenerative medicine. For several key applications including disease modelling, drug discovery, and cell transplantation, large-scale manufacture of mature human cell types from hPSCs is required. Recently, the first hPSC-differentiation protocol for the generation of microglia was published. It was based on the initial formation of embryoid-bodies (EBs) cultured for several months in the same “neuroglial differentiation medium, the component concentrations of which were adjusted to match those of human cerebrospinal fluid” supplemented with interleukin (IL)-34 and colony-stimulating factor 1 (CSF-1) [Muffat et al., 2016]. This seminal publication provided an elaborate media composition for final maturation and maintenance of human microglia. However, the long duration of the protocol, ill-defined initial steps of differentiation (i.e. EB-based, intermediate steps hardly following embryonic rationales), and the need for several mechanical manipulation steps for cell purification are likely to prohibit the widespread application of this protocol. Subsequently, several other groups demonstrated the generation of microglia-like cells from hPSCs by similar, yet different classical differentiation approaches [Abud et al., 2017; Takata et al., 2017; Haenseler et al., 2017; Pandya et al., 2017; Douvaras et al., 2017]. Nonetheless, the in vitro derivation of specific human cell types, including microglia, in a quantity and purity that is required for downstream applications remains challenging, and alternative methods are currently sought [Cohen et al., 2011]. A more recent manufacturing strategy compared to classical differentiation is direct cellular reprogramming [Ladewig et al., 2013]. It refers to the direct conversion of any cell type (typically skin fibroblasts) into another without progression through a pluripotent intermediate. Although providing a quick route for cell production from easily accessible cell types, the yield and purity of the desired cell populations remain low and insufficient [Zhang et al., 2013]. Recently, a third route, termed “forward programming”, was proposed for the manufacture of mature human cell types with unprecedented speed and efficiency [Zhang et al., 2013].

[0006] Forward programming, as a method of directly converting pluripotent stem cells, including hPSCs, to mature cell types has been recognised as a powerful strategy for the derivation of human cells. It involves the forced expression of key lineage transcription factors (or non-coding RNAs, including IncRNA and microRNA), in order to convert the stem cell into a particular mature cell type. Currently available forward programming protocols are largely based on lentiviral transduction of cells, which results in variegated expression or complete silencing of randomly inserted inducible cassettes. This results in the need for additional purification steps in order to isolate a sub-population expressing the required transcription factors. Thus, further refinements of these methods are clearly required.

[0007] Any refinements to the stated methods must ensure that stable transcription of the genetic material contained within the inducible cassette, such as a transgene, is resistant to silencing and other negative integration site-related influences. Silencing may be caused by multiple epigenetic mechanisms, including DNA methylation or histone modifications. With prior art methods based on lentiviral transduction, the cells obtained are a heterogeneous population with the transgene expressed fully, partially or silenced. Clearly, this is not desirable for many applications. Viral vectors demonstrate a tendency to integrate their genetic material into transcriptionally active areas of the genome, thus increasing the potential for oncogenic events due to insertional mutagenesis. For many applications, it is desirable to control the transcription of inserted genetic material in a cell, such that an inducible cassette may be turned on as required and transcribed at particular levels, including high levels. This cannot be achieved if the insertion of the inducible cassette is random in the genome.

[0008] The problem, of microglia being both involved in several serious diseases and entangled into the brain tissue in a way that their isolation from living tissue remains elusive, has been addressed in several publications. To overcome this problem, human stem cells are used to generate microglia or microglia-like cells for example through defined culturing conditions [Muffat et al., 2016] or co-culturing with stem cell derived neurons [Haenseler et al., 2017; Takata et al., 2017]. These methods rely only on the exposure to growth factors and cytokines to differentiate stem cells into microglia.

[0009] Further the need for this special cell type is huge as they play an important role in virtually all diseases of the central nervous system, including neurodegenerative diseases, neuroinflammatory or autoimmune diseases, auto-antibody-mediated encephalitis or infectious diseases, neurovascular diseases, stroke, traumatic brain injuries and cancer, yet the precise mechanisms underlying their role in different diseases remain unclear. Prior art coincides, stem cell-derived microglia are indeed recapitulating the original patients disease-phenotype [Muffat et al., 2016; Abud et al., 2017; Takata et al., 2017]. With this knowledge, the enormous scientific gap of microglia involvement in certain diseases can be overcome by generating microglia from stem cells. However the classical protocols to differentiate stem cells are very time-consuming and the results are not convincing.

[0010] The inventors of the present invention have thus developed a quick method for generating microglia from stem cells by using a stable introduction of an inducible cassette into the genome of a stem cell, whilst being able to control the transcription of that inducible cassette and thereby the inserted transcription factors. The potential of these transcription factors to function as reprogramming factors for the generation of microglia was not known before and represents the unique knowledge of the inventors. This enables them to create a pure microglia population expressing all the surface markers and RNA observed in natural microglia populations. Moreover this method can be used to differentiate microglia from human iPS cells of neurodegenerative disease patients and thus enables to analyse a cell population that otherwise remains completely inert to medical examinations. Accordingly, there is a strong need for manufacture of mature human microglia from easily accessible sources. The technical problem underlying the present application is thus to comply with these needs. The technical problem is solved by providing the embodiments reflected in the claims, described in the description and illustrated in the examples and figures given below.

### SUMMARY OF THE INVENTION

[0011] The inventors of the present invention have developed a method for the production of microglia from stem cells.

[0012] The present invention relates to a method for the production of microglia from stem cells, comprising the steps of a) targeted insertion of a nucleotide sequence encoding a transcriptional regulator protein into a first genomic safe harbour site; and b) targeted insertion of the coding sequence of the transcription factor PU.1 (SEQ ID NO: 1) into a second genomic safe harbour site, wherein the gene is operably linked to an inducible promoter, which is regulated by the transcriptional regulator protein; expression of PU.1 (SEQ ID NO: 2); and c) culturing the stem cells received from steps a) and b) with exposure to at least one growth factor or small molecule that recapitulates signaling during at least one stage of embryonic development of microglia or adult microglia proliferation, differentiation or polarization.

[0013] In one embodiment of the method of the present invention, the at least one growth factor or small molecule is selected from the group consisting of Activin A (SEQ ID NO: 7), BMP4 (SEQ ID NO: 8), FGF (SEQ ID NO: 9), VEGF-A (SEQ ID NO: 10), LY294002, CHIR99021, SCF (SEQ ID NO: 11), IL-3 (SEQ ID NO: 12), IL-6 (SEQ ID NO: 13), CSF1 (SEQ ID NO: 14), IL-34 (SEQ ID NO: 15), CSF2 (SEQ ID NO: 16), CD200 (SEQ ID NO: 17), CX3CL1 (SEQ ID NO: 18), TGFβ1 (SEQ ID NO: 19), and IDE1.

[0014] In a further embodiment of the method of the present invention, the at least one growth factor is CSF1 (SEQ ID NO: 14) or IL-34 (SEQ ID NO: 15).

[0015] In an additional embodiment of the method of the present invention, the at least one small molecule is CHIR99021, LY294002 or IDE1.

[0016] In another embodiment of the method of the present invention, the first and the second genomic safe harbour sites are different.

[0017] In a further embodiment of the method of the present invention, the method further comprises insertion of the coding sequence of the gene of the transcription factor CEBPB (SEQ ID NO: 3) and expression thereof.

[0018] In another embodiment of the method of the present invention, the method further comprises insertion of the coding sequence of the gene of the transcription factor RUNX1 (SEQ ID NO: 4) and expression thereof.

[0019] In a further embodiment of the method of the present invention, the method further comprises insertion of the coding sequence of the gene of the transcription factor IRF8 (SEQ ID NO: 5) and expression thereof.

[0020] In another embodiment of the method of the present invention, the method further comprises insertion of the coding sequence of the gene of the transcription factor SALL1 (SEQ ID NO: 6) and expression thereof.

[0021] In an additional embodiment of the method of the present invention, the transcriptional regulator protein is the reverse tetracycline transactivator (rtTA) (SEQ ID NO: 20) and the activity thereof is controlled by doxycycline or tetracycline.

[0022] In another embodiment of the method of the present invention, the inducible promoter includes a Tet Responsive Element (TRE) (SEQ ID NO: 21).

[0023] In a further embodiment of the method of the present invention, said first and said second genomic safe harbour sites are selected from the group consisting of the hROSA26 locus (SEQ ID NO: 22), the AAVS1 locus (SEQ ID NO: 23), the CLYBL gene (SEQ ID NO: 24), the CCR5 gene (SEQ ID NO: 25), the HPRT gene (SEQ ID NO: 26) or genes with the site ID 325 on chromosome 8 (SEQ ID NO: 27), site ID 227 on chromosome 1 (SEQ ID NO: 28), site ID 229 on chromosome 2 (SEQ ID NO: 29), site ID 255 on chromosome 5 (SEQ ID NO: 30), site ID 259 on chromosome 14 (SEQ ID NO: 31), site ID 263 on chromosome X (SEQ ID NO: 32), site ID 303 on chromosome 2 (SEQ ID NO: 33), site ID 231 on chromosome 4 (SEQ ID NO: 34), site ID 315 on chromosome 5 (SEQ ID NO: 35), site ID 307 on chromosome 16 (SEQ ID NO: 36), site ID 285 on chromosome 6 (SEQ ID NO: 37), site ID 233 on chromosome 6 (SEQ ID NO: 38), site ID 311 on chromosome 134 (SEQ ID NO: 39), site ID 301 on chromosome 7 (SEQ ID NO: 40), site ID 293 on chromosome 8 (SEQ ID NO: 41), site ID 319 on chromosome 11 (SEQ ID NO: 42), site ID 329 on chromosome 12 (SEQ ID NO: 43), site ID 313 on chromosome X (SEQ ID NO: 44).

[0024] In another embodiment of the method of the present invention, said stem cell is a pluripotent stem cell, an induced pluripotent stem cell (iPSC), a neural progenitor cell, hematopoietic stem cell or an embryonic stem cell (ESC).

[0025] In a further embodiment of the method of the present invention, said stem cell is a human or a mouse stem cell.

[0026] The present invention also relates to a microglia cell obtained by any of the methods according to the present invention, preferably wherein the microglia expresses at least one microglia surface protein selected from the group consisting of ITGAM (CD11B) (SEQ ID NO: 45), ITGAX (CD11C) (SEQ ID NO: 46), CD14 (SEQ ID NO: 47), CD16 (SEQ ID NO: 48), ENTPD1 (CD39) (SEQ ID NO: 49), PTPRC (CD45) (SEQ ID NO: 50), CD68 (SEQ ID NO: 51), CSF1R (CD115) (SEQ ID NO: 52), CD163 (SEQ ID NO: 53), CX3CR1 (SEQ ID NO: 54), TREM2 (SEQ ID NO: 55), P2RY12 (SEQ ID NO: 56), TMEM119 (SEQ ID NO: 57), and HLA-DR (SEQ ID NO: 58).

[0027] In a further embodiment of the present invention, the microglia cell is for use in therapy.

[0028] Further, the present invention is directed to the use of such a microglia cell according to the present invention for in vitro diagnostics of a disease. Preferably, the disease is selected from the group consisting of diseases of the central nervous system, preferably neurodegenerative diseases; more preferably Alzheimer's disease, Parkinson's disease, frontotemporal dementia or Amyotrophic Lateral Sclerosis; neuroinflammatory or autoimmune diseases, preferably Multiple Sclerosis, auto-antibody-mediated encephalitis or infectious diseases, neurovascular diseases; preferably stroke, vasculitis; traumatic brain injury, and cancer.

[0029] Further, the present invention is directed to the use of such a microglia cell according to the present invention for in vitro culturing with brain organoids.

### BRIEF DESCRIPTION OF THE FIGURES

[0030] FIG. 1 shows a scheme of major pathways for cell manufacturing, that are reprogramming of somatic cells (fibroblasts) into induced pluripotent stem cells (iPSC) using the four defined transcription factors Klf4, Oct4, c-Myc and Sox2, direct reprogramming as direct conversion of somatic cells into the desired target cell type using defined transcription factors, classical differentiation approaches, representing a stepwise conversion from a pluripotent stem cell into the desired target cell, and forward programming as the direct conversion of hPSCs into the target cell type. (Abbreviations: TF=transcription factor, ESC=embryonic stem cell, iPSC=induced pluripotent stem cell (ESCs and iPSCs are collectively termed pluripotent stem cells (PSCs))

[0031] FIG. 2 shows the targeting strategy used in the present invention. The dox inducible Tet-ON system was targeted into the human ROSA26 locus (CAG-rtTA) and the AAVS1 site (TRE-EGFP) of hPSCs. (Abbreviations: HAR=homology arm, Neo=neomycin-resistance gene, CAG=constitutive CAG promoter, rtTA=reverse tetracycline-controlled transactivator, Puro=puromycin-resistance gene, TRE=inducible Tet-responsive element, EGFP=enhanced green fluorescent protein, SA=splice acceptor, T2A=T2A cleavage site, pA=poly-adenylation site)

[0032] FIG. 3 shows a table of the key transcription factors of the microglia lineage, selected as candidate reprogramming factors, the length of their coding sequence and their source.

[0033] FIG. 4 shows donor plasmids that were generated by molecular cloning and used for the genetic modification of either the ROSA26 GSH or the AAVS1 GSH. (Abbreviations: HAR=homology arm, Neo=neomycin-resistance gene, CAG=constitutive CAG promoter, rtTA=reverse tetracycline-controlled transactivator, Puro=puromycin-resistance gene, TRE=inducible Tet-responsive element, EGFP=enhanced green fluorescent protein, SA=splice acceptor, T2A=T2A cleavage site, pA=poly-adenylation site)

[0034] FIG. 5 shows a scheme of the microglia forward programming protocol (see FIG. 5A). Time-course of cell surface markers expressed on primitive macrophages and microglia assessed by flow cytometry (n=2 biological replicates) (see FIG. 5B and FIG. 5C). Day 20 microglia monoculture: phase contrast live image of a microglia-like cell and ICC for the microglia-signature transmembrane protein TMEM119, for which dedicated labelled flow-antibodies are not available (see FIG. 5D). Day 20 microglia/neuron coculture: ICC for the intracellular calcium-binding protein IBA1 (also known as AIF1) and the neuronal marker βIII-tubulin (TUBB3) (see FIG. 5E). QPCR (SYBR green) of hiPSCs and microglia in monoculture (day 20). All values are relative to the housekeeping gene GAPDH and normalised to hiPSCs. For the transcripts of SPI1 and CEBPB two different primer pairs (see SEQ ID NOs: 80-87; SEQ ID NO: 80: SPI1 total forward primer; SEQ ID NO: 81: SPI1 total reverse primer; SEQ ID NO: 82: SPI1 endo forward primer; SEQ ID NO: 83: SPI1 endo reverse primer; SEQ ID NO: 84: CEBPB total forward primer; SEQ ID NO: 85: CEBPB total reverse primer; SEQ ID NO: 86: CEBPB endo forward primer; SEQ ID NO: 87: CEBPB endo reverse primer) were used, detecting either all transcripts (total), or only transcripts from the respective endogenous gene loci, but not the AAVS1-targeted transgenes (endo). As expected, no difference was detected in the relative expression levels, as transgene expression was turned off (by withdrawal of dox at day 10 of the protocol), thus confirming the transgene-independence of the cellular phenotype (F).

[0035] FIG. 6 shows immunocytochemistry of a double targeted iPS cell line induced with doxycycline for 24 hours. The cells were positive for PU.1 and CEBPB but negative for OCT4.

[0036] FIG. 7 shows a map of the Donor Plasmid pUC_AAVS1_p-Resp-(PU.1-CEBPB) (SEQ ID NO: 61), for genetic modification of the AAVS1 locus, containing the coding sequence of the transcription factors PU.1 and CEBPB.

[0037] FIG. 8 shows a map of the Donor Plasmid pUC_AAVS1_p-Resp-(PU.1-IRF8) (SEQ ID NO: 62), for genetic modification of the AAVS1 locus, containing the coding sequence of the transcription factors PU.1 and IRF8.

[0038] FIG. 9 shows a map of the Donor Plasmid pUC_AAVS1_p-Resp-(PU.1-RUNX1) (SEQ ID NO: 63), for genetic modification of the AAVS1 locus, containing the coding sequence of the transcription factors PU.1 and RUNX1.

[0039] FIG. 10 shows a map of the Donor Plasmid pUC_AAVS1_p-Resp-(PU.1) (SEQ ID NO: 64), for genetic modification of the AAVS1 locus, containing the coding sequence of the transcription factor PU.1.

[0040] FIG. 11 shows a map of the Donor Plasmid pUC_AAVS1_p-Resp-(PU.1-SALL1) (SEQ ID NO: 65), for genetic modification of the AAVS1 locus, containing the coding sequence of the transcription factors PU.1 and SALL1.

[0041] FIG. 12 shows a map of the plasmid ROSA-guideA_Cas9n (SEQ ID NO: 66) containing the coding sequence of the Cas enzyme and guide RNA A.

[0042] FIG. 13 shows a map of the plasmid ROSA-guideB_Cas9n (SEQ ID NO: 67) containing the coding sequence of the Cas enzyme and guide RNA B.

[0043] FIG. 14 shows a map of the donor plasmid pUC_ROSA_n_CAG-rtTA (SEQ ID NO: 72) containing the constitutive CAG promoter and the rtTA.

[0044] FIG. 15 shows a map of the plasmid pZFN-AAVS1-L_ELD (SEQ ID NO: 68).

[0045] FIG. 16 shows a map of the plasmid pZFN-AAVS1-R_KKR (SEQ ID NO: 69).

[0046] The following abbreviations are used: T2A: T2A peptide (ribosomal skipping signal), puroR: puromycin resistance gene, pA: polyadenylation signal, CAG: constitutive CAG promoter, TRE3GV: Tet-responsive element, HA-R, HA-L: homology arm (right, left), AmpR: Ampicillin resistance gene, ori: origin of replication, NeoR: neomycin resistance gene, KanR: kanamycin resistance gene.

### DETAILED DESCRIPTION OF THE INVENTION

[0047] The present invention relates to a method for the production of microglia from stem cells, comprising the steps of a) targeted insertion of a nucleotide sequence encoding a transcriptional regulator protein into a first genomic safe harbour site; and b) targeted insertion of the coding sequence of the transcription factor PU.1 (SEQ ID NO: 1) into a second genomic safe harbour site, wherein the gene is operably linked to an inducible promoter, which is regulated by the transcriptional regulator protein; expression of PU.1 (SEQ ID NO: 2); and c) culturing the stem cells received from steps a) and b) with exposure to at least one growth factor or small molecule that recapitulates signaling during at least one stage of embryonic development of microglia or adult microglia proliferation, differentiation or polarization.

[0048] In one embodiment, the present invention relates to a method of producing microglia from stem cells, comprising the steps of a) targeted insertion of a nucleotide sequence encoding a transcriptional regulator protein into a first genomic safe harbour site; and b) targeted insertion of the coding sequence of the transcription factor PU.1 (SEQ ID NO: 1) into a second genomic safe harbour site, wherein the gene is operably linked to an inducible promoter, which is regulated by the transcriptional regulator protein; expression of PU.1 (SEQ ID NO: 2); and c) culturing the stem cells received from steps a) and b) with exposure to at least one growth factor or small molecule that recapitulates signaling during at least one stage of embryonic development of microglia or adult microglia proliferation, differentiation or polarization.

[0049] In one embodiment, the present invention relates to a method of producing microglia from stem cells, comprising the steps of a) targeted insertion of a nucleotide sequence encoding a transcriptional regulator protein into a first genomic safe harbour site; and b) targeted insertion of the coding sequence of the transcription factor PU.1 (SEQ ID NO: 1) into a second genomic safe harbour site, wherein the gene is operably linked to an inducible promoter, which is regulated by the transcriptional regulator protein; expression of PU.1 (SEQ ID NO: 2); and c) culturing the stem cells received from steps a) and b) with exposure to at least one growth factor or small molecule that recapitulates signaling during at least one stage of embryonic development of microglia.

[0050] In one embodiment, the present invention relates to a method for the production of microglia from stem cells, comprising the steps of a) targeted insertion of a nucleotide sequence encoding a transcriptional regulator protein into a first genomic safe harbour site; and b) targeted insertion of the coding sequence of the transcription factor PU.1 (SEQ ID NO: 1) into a second genomic safe harbour site, wherein the gene is operably linked to an inducible promoter, which is regulated by the transcriptional regulator protein; expression of PU.1 (SEQ ID NO: 2); and c) culturing the stem cells received from steps a) and b) with exposure to at least one growth factor or small molecule that recapitulates signaling during at least one stage of embryonic development of microglia.

[0051] In one embodiment, the present invention also relates to a method for the production of microglia from stem cells, comprising the steps of a) targeted insertion of a nucleotide sequence encoding a transcriptional regulator protein into a first genomic safe harbour site; and b) targeted insertion of the coding sequence of the transcription factor PU.1 (SEQ ID NO: 1) into a second genomic safe harbour site, wherein the gene is operably linked to an inducible promoter, which is regulated by the transcriptional regulator protein; expression of PU.1 (SEQ ID NO: 2); and c) culturing the stem cells received from steps a) and b) with exposure to at least one growth factor or small molecule that recapitulates signaling during at least one stage of adult microglia differentiation.

[0052] In one further embodiment, the present invention relates to a method for the production of microglia from stem cells, comprising the steps of a) targeted insertion of a nucleotide sequence encoding a transcriptional regulator protein into a first genomic safe harbour site; and b) targeted insertion of the coding sequence of the transcription factor PU.1 (SEQ ID NO: 1) into a second genomic safe harbour site, wherein the gene is operably linked to an inducible promoter, which is regulated by the transcriptional regulator protein; expression of PU.1 (SEQ ID NO: 2); and c) culturing the stem cells received from steps a) and b) with exposure to at least one growth factor or small molecule that recapitulates signaling during at least one stage of adult microglia polarization.

[0053] In another embodiment, the present invention relates to a method for the production of microglia from stem cells, comprising the steps of a) targeted insertion of a nucleotide sequence encoding a transcriptional regulator protein into a first genomic safe harbour site; and b) targeted insertion of the coding sequence of the transcription factor PU.1 (SEQ ID NO: 1) into a second genomic safe harbour site, wherein the gene is operably linked to an inducible promoter, which is regulated by the transcriptional regulator protein; expression of PU.1 (SEQ ID NO: 2); and c) culturing the stem cells received from steps a) and b) with exposure to at least one growth factor or small molecule that recapitulates embryonic development of microglia.

[0054] In one further embodiment, the present invention relates to a method for the production of microglia from stem cells, comprising the steps of a) targeted insertion of a nucleotide sequence encoding a transcriptional regulator protein into a first genomic safe harbour site; and b) targeted insertion of the coding sequence of the transcription factor PU.1 (SEQ ID NO: 1) into a second genomic safe harbour site, wherein the gene is operably linked to an inducible promoter, which is regulated by the transcriptional regulator protein; expression of PU.1 (SEQ ID NO: 2); and c) culturing the stem cells received from steps a) and b) with exposure to at least one growth factor or small molecule that mimics signaling during at least one stage of embryonic development of microglia or adult microglia proliferation, differentiation or polarization.

[0055] In one further embodiment, the present invention relates to a method for the production of microglia from stem cells, comprising the steps of a) targeted insertion of a nucleotide sequence encoding a transcriptional regulator protein into a first genomic safe harbour site; and b) targeted insertion of the coding sequence of the transcription factor PU.1 (SEQ ID NO: 1) into a second genomic safe harbour site, wherein the gene is operably linked to an inducible promoter, which is regulated by the transcriptional regulator protein; expression of PU.1 (SEQ ID NO: 2); and c) culturing the stem cells received from steps a) and b) with exposure to at least one growth factor or small molecule that mimics signaling during at least one stage of embryonic development of microglia.

[0056] In one embodiment, the present invention also relates to a method for the production of microglia from stem cells, comprising the steps of a) targeted insertion of a nucleotide sequence encoding a transcriptional regulator protein into a first genomic safe harbour site; and b) targeted insertion of the coding sequence of the transcription factor PU.1 (SEQ ID NO: 1) into a second genomic safe harbour site, wherein the gene is operably linked to an inducible promoter, which is regulated by the transcriptional regulator protein; expression of PU.1 (SEQ ID NO: 2); and c) culturing the stem cells received from steps a) and b) with exposure to at least one growth factor or small molecule that recapitulates embryonic development of microglia in vitro.

[0057] As used within the present invention, the term “microglia” means a mature cell type being a distinct cell population of the central nervous system. As defined in Comparative Anatomy and Histology, “microglia is the resident histiocytic-type cell and the key innate immune effector of the CNS. They are often described as either resting (i.e., ramified) or activated, but these terms fail to convey the dynamic remodeling of their fine processes and constitutive immunosurveillance activity. ( . . . ) Evidence suggests that early microglia are derived from yolk sac progenitors.” (Hagan et al., 2012). Meaning microglia are generated during early embryonic stages and reside in the brain throughout adult live.

[0058] As used within the present invention, the term “production of microglia” means the generation of a mature cell (microglia) from a stem cell, which is obtained by any of the methods of the present invention as described herein.

[0059] As used within the present invention, the term “stem cell” means a type of cell that is able to divide for producing more cells or to develop into a cell that has a particular purpose. In the present invention, the used stem cell might be a pluripotent stem cell. Pluripotent stem cells have the potential to differentiate into almost any cell in the body. There are several sources of pluripotent stem cells. Embryonic stem cells (ES cells) are pluripotent stem cells derived from the inner cell mass of a blastocyst, an early-stage preimplantation embryo. Induced pluripotent stem cells (iPSCs) are adult cells that have been genetically reprogrammed to an embryonic stem cell-like state by being forced to express genes and factors important for maintaining the defining properties of embryonic stem cells. In 2006 it was shown that the introduction of four specific genes encoding transcription factors could convert adult cells into pluripotent stem cells (Takahashi et al., 2006), but subsequent work has reduced/altered the number of genes that are required. Oct-3/4 and certain members of the Sox gene family have been identified as potentially crucial transcriptional regulators involved in the induction process. Additional genes including certain members of the Klf family, the Myc family, Nanog, and LIN28, may increase the induction efficiency. Examples of the genes, which may be contained in the reprogramming factors, include Oct3/4, Sox2, SoxI, Sox3, SoxI5, SoxI7, Klf4, Klf2, c-Myc, N-Myc, L-Myc, Nanog, Lin28, Fbxl5, ERas, ECAT15-2, Tell, beta-catenin, Lin28b, Sall1, Sall4, Esrrb, Nr5a2, Tbx3 and GlisI, and these reprogramming factors may be used singly, or in combination of two or more kinds thereof.

[0060] If the cells modified by insertion of an inducible cassette are to be used in a human patient, it may be preferred that the cell is an iPSC derived from that individual. Such use of autologous cells would remove the need for matching cells to a recipient. Alternatively, commercially available iPSC may be used, which are known to a person skilled in the art. Alternatively, the cells may be a tissue-specific stem cell, which may also be autologous or donated. Suitable cells include epiblast stem cells, induced neural stem cells and other tissue-specific stem cells.

[0061] In some embodiments of the method of the present invention, it may be preferred that the used stem cell is an embryonic stem cell or stem cell line. Numerous embryonic stem cell lines are now available, for example, WA01 (HI), WA09 (H9), KhES-1, KhES-2 and KhES-3. Stem cell lines, which have been derived without destroying an embryo, are available. The present invention does not extend to any methods which involve the destruction of human embryos.

[0062] As used within the present invention, the term “targeted insertion” means the insertion into a genomic safe harbour (GSH) site, which is preferably specifically within the sequence of the GSH as described elsewhere. Any suitable technique for insertion of a polynucleotide into a specific sequence may be used, and several are described in the art. Suitable techniques include any method known to a person skilled in the art, which introduces a break at the desired location and permits recombination of the vector into the gap. Thus, a crucial first step for targeted site-specific genomic modification is the creation of a double-strand DNA break (DSB) at the genomic locus to be modified. Distinct cellular repair mechanisms can be exploited to repair the DSB and to introduce the desired sequence, and these are non-homologous end joining repair (NHEJ), which is more prone to error; and homologous recombination repair (HR) mediated by a donor DNA template, that can be used to insert inducible cassettes.

[0063] Several techniques exist to allow customized site-specific generation of DSB in the genome. Many of these involve the use of customized endonucleases, such as zinc finger nucleases (ZFNs), transcription activator-like effector nucleases (TALENs) or the clustered regularly interspaced short palindromic repeats/CRISPR associated protein (CRISPR/Cas9) system (Gaj et al., 2013). Zinc finger nucleases are artificial enzymes, which are generated by fusion of a zinc-finger DNA-binding domain to the nuclease domain of the restriction enzyme FokI. The latter has a non-specific cleavage domain, which must dimerize in order to cleave DNA. This means that two ZFN monomers are required to allow dimerization of the FokI domains and to cleave the DNA. The DNA binding domain may be designed to target any genomic sequence of interest, may be a tandem array of Cys2His2 zinc fingers, each of which recognises three contiguous nucleotides in the target sequence. The two binding sites are separated by 5-7 bp to allow optimal dimerization of the FokI domains. The enzyme thus is able to cleave DNA at a specific site, and target specificity is increased by ensuring that two proximal DNA-binding events must occur to achieve a double-strand break. Transcription activator-like effector nucleases, or TALENs, are dimeric transcription factor/nucleases. They are made by fusing a TAL effector DNA-binding domain to a DNA cleavage domain (a nuclease). Transcription activator-like effectors (TALENs) can be engineered to bind practically any desired DNA sequence, so when combined with a nuclease, DNA can be cut at specific locations. TAL effectors are proteins that are secreted by Xanthomonas bacteria, the DNA binding domain of which contains a repeated highly conserved 33-34 amino acid sequence with divergent 12th and 13th amino acids. These two positions are highly variable and show a strong correlation with specific nucleotide recognition. This straightforward relationship between amino acid sequence and DNA recognition has allowed for the engineering of specific DNA-binding domains by selecting a combination of repeat segments containing appropriate residues at the two variable positions. TALENs are thus built from arrays of 33 to 35 amino acid modules, each of which targets a single nucleotide. By selecting the array of the modules, almost any sequence may be targeted. The nuclease used may be FokI or a derivative thereof.

[0064] Three types of CRISPR mechanisms have been identified, of which type II is best studied. The CRISPR/Cas9 system (type II system) utilises the Cas9 nuclease to make a double-stranded break in DNA at a site determined by a short guide RNA. The CRISPR/Cas system is a prokaryotic immune system that confers resistance to foreign genetic elements. CRISPR are segments of prokaryotic DNA containing short repetitions of base sequences. Each repetition is followed by short segments of “protospacer DNA” from previous exposures to foreign genetic elements. CRISPR spacers recognize and cut the exogenous genetic elements using RNA interference. The CRISPR immune response occurs through two steps: CRISPR-RNA (crRNA) biogenesis and crRNA-guided interference. CrRNA molecules are composed of a variable sequence transcribed from the protospacer DNA and a CRISP repeat. Each crRNA molecule then hybridizes with a second RNA, known as the trans-activating CRISPR RNA (tracrRNA) and together these two eventually form a complex with the nuclease Cas9. The protospacer DNA encoded section of the crRNA directs Cas9 to cleave complementary target DNA sequences, if they are adjacent to short sequences known as protospacer adjacent motifs (PAMs). This natural system has been engineered and exploited to introduce DSB breaks in specific sites in genomic DNA, amongst many other applications. In particular, the CRISPR type II system from Streptococcus pyogenes may be used. At its simplest, the CRISPR/Cas9 system comprises two components that are delivered to the cell to provide genome editing: The Cas9 nuclease itself and a small guide RNA (gRNA). The gRNA is a fusion of a customised, site-specific crRNA (directed to the target sequence) and a standardized tracrRNA.

[0065] Once a DSB has been made, a donor template with homology to the targeted locus is supplied. The DSB may be repaired by the homology-directed repair (HDR) pathway allowing for precise insertions to be made. Derivatives of this system are also possible. Mutant forms of Cas9 are available, such as Cas9D10A, with only nickase activity. This means, it cleaves only one DNA strand, and does not activate NHEJ. Instead, when provided with a homologous repair template, DNA repairs are conducted via the high-fidelity HDR pathway only. Cas9D10A may be used in paired Cas9 complexes designed to generate adjacent DNA nicks in conjunction with two sgRNAs, complementary to the adjacent area on opposite strands of the target site, which may be particularly advantageous. The elements for making the double-strand DNA break may be introduced in one or more vectors such as plasmids for expression in the cell. Thus, any method of making specific, targeted double strand breaks in the genome in order to allow the insertion of a nucleotide sequence/gene/inducible cassette may be used in the method of the present invention. It may be preferred that the method of the present invention utilises for inserting the gene/inducible cassette any one or more of ZFNs, TALENs and/or CRISPR/Cas9 systems or any derivative thereof.

[0066] Once the DSB has been made by any appropriate means, the gene/inducible cassette for insertion may be supplied in any suitable fashion as described below. The gene/inducible cassette and associated genetic material form the donor DNA for repair of the DNA at the DSB and are inserted using standard cellular repair machinery/pathways. How the break is initiated will alter which pathway is used to repair the damage, as noted above. However, this is also within the knowledge of a person skilled in the art.

[0067] As used within the present invention, the term “gene” means the basic physical unit heredity, a linear sequence of nucleotides along a segment of DNA that provides the coded instructions for synthesis of RNA, which, when translated into protein, leads to the expression of hereditary character.

[0068] As used within the present invention, the term “nucleotide sequence” refers to a succession of bases in a DNA segment forming a gene as defined above.

[0069] As used within the present invention, the term “transcriptional regulator protein” means a protein that binds to DNA, preferably sequence-specifically to a DNA site located in or near a promoter, and either facilitating the binding of the transcription machinery to the promoter, and thus transcription of the DNA sequence (a transcriptional activator) or blocks this process (a transcriptional repressor). Such entities are also known as transcription factors. The DNA sequence that a transcriptional regulator protein binds to is called a transcription factor-binding site or response element, and these are found in or near the promoter of the regulated DNA sequence. A responsive element is part of this invention. Transcriptional activator proteins bind to a response element and promote gene expression. Such proteins are preferred in the method of the present invention for controlling inducible cassette expression. Transcriptional repressor proteins bind to a response element and prevent gene expression. Transcriptional regulator proteins may be activated or deactivated by a number of mechanisms including binding of a substance, interaction with other transcription factors (e.g., homo- or hetero-dimerization) or coregulatory proteins, phosphorylation, and/or methylation. The transcriptional regulator may be controlled by activation or deactivation. If the transcriptional regulator protein is a transcriptional activator protein, it is preferred that the transcriptional activator protein requires activation. This activation may be through any suitable means, but it is preferred that the transcriptional regulator protein is activated through the addition of an exogenous substance to the stem cell. The supply of an exogenous substance to the stem cell can be controlled, and thus the activation of the transcriptional regulator protein can be controlled. Such transcriptional regulator proteins are also called inducible transcriptional regulator proteins.

[0070] As used within the present invention, the term “transcription factor” means a protein that binds to DNA, preferably sequence-specifically to a DNA site located in or near a promoter, and either facilitating the binding of the transcription machinery to the promoter, and thus transcription of the DNA sequence (a transcriptional activator) or blocks this process (a transcriptional repressor). In the context of the present invention, a transcription factor is a desired genetic sequence, preferably a DNA sequence that is to be transferred into a cell together with an inducible cassette. The introduction of an inducible cassette into the genome has the potential to change the phenotype of that cell by addition of a genetic sequence that permits gene expression. The method of the present invention provides for controllable transcription of the genetic sequence(s) of a set of transcription factors within the inducible cassette in the cell.

[0071] Master regulators may be one or more of: transcription factors, transcriptional regulators, cytokine receptors or signalling molecules and the like. A master regulator is an expressed gene that influences the lineage of the cell expressing it. It may be that a network of master regulators is required for the lineage of a cell to be determined. As used herein, a master regulator gene that is expressed at the inception of a developmental lineage or cell type, participates in the specification of that lineage by regulating multiple downstream genes either directly or through a cascade of gene expression changes. If the master regulator is expressed it has the ability to re-specify the fate of cells destined to form other lineages. The transcription factors, which may be used in the method of the present invention, include PU.1 (SEQ ID NO: 2) (gene SPI1, SEQ ID NO: 1), CEBPB (SEQ ID NO: 3), RUNX1 (SEQ ID NO: 4), IRF8 (SEQ ID NO: 5), and SALL1 (SEQ ID NO: 6).

[0072] As used within the present invention, the term “PU.1” (SEQ ID NO: 2) means a transcription factor also known as Hematopoietic Transcription Factor PU.1, Spi-1 Proto-Oncogene, 31 kDa Transforming Protein, Transcription Factor PU.1, Spleen Focus Forming Virus (SFFV) Proviral Integration Oncogene Spi1, Spleen Focus Forming Virus (SFFV) Proviral Integration Oncogene, or 31 kDa-Transforming Protein, SFPI1, SPI-1, SPI-A, PU.1 or OF, wherein “SPI1” refers to the gene (SEQ ID NO: 1) (Spi-1 Proto-Oncogene), which encodes an ETS-domain transcription factor that activates gene expression during myeloid and B-lymphoid cell development.

[0073] As used within the present invention, the term “genomic safe harbour site” means a genetic site, which allows the insertion of genetic material without deleterious effects for the cell and permits transcription of the inserted genetic material. Those skilled in the art may use these simplified criteria to identify a suitable GSH, and/or the more formal criteria. Insertions specifically within genomic safe harbour sites (GSH) are preferred over random genome integration, since this is expected to be a safer modification of the genome, and is less likely to lead to unwanted side effects, such as silencing natural gene expression or causing mutations that lead to cancerous cell types. Thus, a genomic safe harbour site is a locus within the genome, wherein a gene or other genetic material may be inserted without any deleterious effects on the cell or on the inserted genetic material. Most beneficial is a GSH site in which expression of the inserted gene sequence is not perturbed by any read-through expression from neighbouring genes and expression of the inducible cassette, minimizes interference with the endogenous transcription programme. More formal criteria have been proposed that assist in the determination of whether a particular locus is a GSH site (Pellenz et al., 2019). These criteria include a site that is (i) >300 kb from any cancer-related gene on all Oncogenes list, (ii) >300 kb from any miRNA/other functional small RNAs, (iii) >50 kb from any 5′ gene end, (iv) >50 kb away from any replication origin, (v) >50 kb away from any ultra-conserved element, (vi) low transcriptional activity (no mRNA±25 kb), (vii) not in copy number variable region (viii) in open chromatin (DHS signal±1 kb) and (ix) unique (1 copy in human genome). It may not be necessary to satisfy all of these proposed criteria, since GSH already identified do not fulfil all of these criteria. It is preferred, that a suitable GSH may satisfy at least 3, 4, 5, 6, 7 or 8 and most preferably all nine of these criteria.

[0074] In the methods of the present invention, insertions occur at different GSH. At least two GSH are required. The first GSH is modified by insertion of a transcriptional regulator protein. The second GSH is modified by the insertion of an inducible cassette, which comprises a coding sequence operably linked to an inducible promoter. Other genetic material may also be inserted with either or both of these elements. The genetic sequence, operably linked to an inducible promoter within the inducible cassette, is preferably a DNA sequence. The genetic sequence(s) of the inducible cassette preferably encode a RNA molecule and are thus capable of being transcribed. The transcription is controlled using the inducible promoter. The RNA molecule may be of any sequence, but is preferably an mRNA encoding a protein, a shRNA or a gRNA.

[0075] The first GSH can be any suitable GSH site. Optionally, it is a GSH with an endogenous promoter that is constitutively expressed, which will result in the inserted transcriptional regulator protein being constitutively expressed. A suitable GSH is the hROSA26 site for human cells. In a further embodiment of the present invention, the inserted transcriptional regulator protein, operably linked to a promoter, is a constitutive promoter. A constitutive promoter can be, for example, used in conjunction with an insertion in the hROSA26 site.

[0076] As used within the present invention, the term “inducible promoter” means a nucleotide sequence, which initiates and regulates transcription of a polynucleotide. An “inducible promoter” is a nucleotide sequence, wherein expression of a genetic sequence operably linked to the promoter is controlled by an analyte, co-factor, regulatory protein, etc. In one embodiment of the method of the present invention, the control is affected by the transcriptional regulator protein. It is intended that the term “promoter” or “control element” includes full-length promoter regions and functional (e.g., controls transcription or translation) segments of these regions. It is preferred that the gene encoding the transcriptional regulator protein is operably linked to a constitutive promoter. Alternatively, the first GSH can be selected such that it already has a constitutive promoter that can also drive expression of the transcriptional regulator protein gene and any associated genetic material. Constitutive promoters ensure sustained and high-level gene expression. Commonly used constitutive promoters include the human β-actin promoter (ACTB), cytomegalovirus (CMV), elongation factor-Ia (EFIa), phosphoglycerate kinase (PGK) and ubiquitin C (UbC). The CAG promoter is a strong synthetic promoter frequently used to drive high levels of gene expression.

[0077] As used within the present invention, the term “culturing” means the growth of microorganisms such as bacteria and yeast, or human, plant, or animal cells under suitable conditions ensuring the growth, which are knowledge of the person skilled in the art.

[0078] As used within the present invention, the term “growth factor” means a signaling molecule that controls cell activities in an autocrine, paracrine or endocrine manner. As used herein, in the context of the present invention, the term “growth factor” may be used interchangeably with “cytokine”. Growth factors or cytokines are produced by different cell types of the organism and exert their biological functions by binding to specific receptors and activating associated downstream signaling pathways which in turn, regulate gene transcription in the nucleus and ultimately stimulate a biological response, including regulatory cellular processes like cell division, cell survival, cell differentiation, adhesion and migration.

[0079] As used within the present invention, the term “small molecule” means a bioactive molecule that is naturally or artificially produced and is capable of diffusion through the cell membrane and is able to regulate signaling pathways. Small molecules, which are preferably used within the present invention, may inhibit phosphatidylinositol 3-kinase (PI3K) and glycogen synthase kinase 3, respectively like LY294002 and CHIR99021.

[0080] As used within the present invention, the term “recapitulates signaling” means to simulate, to imitate or to resemble the functions of secreted molecules, such as growth factors and/or chemokines, influencing a cell in a natural environment and thereby being able to produce microglia by these actions.

[0081] As used within the present invention, the term “mimics signaling” means to simulate, to imitate, to resemble or to recapitulate the functions of secreted molecules, such as growth factors and/or chemokines, influencing a cell in a natural environment and thereby being able to produce microglia by these actions.

[0082] As used within the present invention, the term “embryonic development of microglia” means the stepwise transition of a pluripotent stem cell into a mature microglia cell according to the sequel of developmental microglia differentiation during human embryonic, fetal and postnatal development, starting from the pre-implantation blastocyst-stage embryo through to fully-established and self-maintained microglia population.

[0083] As used within the present invention, the term “adult microglia proliferation” means any cell division process that leads to a mature microglia cell.

[0084] As used within the present invention, the term “adult microglia differentiation” means the differentiation of a cell being in a microglia progenitor's state into an adult microglia cell type, that incorporates typical characteristics of a microglia cell in homeostatic/resting state.

[0085] As used within the present invention, the term “adult microglia polarization” means the reaction of a mature microglia cell to extracellular stimuli provided by the extracellular environment, respectively signals from injured neurons, glia cells, or exposure to plasma proteins, due to blood brain barrier dysfunction. This microglial reaction includes movement of the microglia cell towards the injury site and can either have a neuroprotective or -toxic effect.

[0086] Further, in one embodiment of the method of the present invention, the at least one growth factor or small molecule is selected from the group consisting of Activin A (SEQ ID NO: 7), BMP4 (SEQ ID NO: 8), FGF (SEQ ID NO: 9), VEGF-A (SEQ ID NO: 10), LY294002, CHIR99021, SCF (SEQ ID NO: 11), IL-3 (SEQ ID NO: 12), IL-6 (SEQ ID NO: 13), CSF1 (SEQ ID NO: 14), IL-34 (SEQ ID NO: 15), CSF2 (SEQ ID NO: 16), CD200 (SEQ ID NO: 17), CX3CL1 (SEQ ID NO: 18), TGFβ1 (SEQ ID NO: 19), and IDE1.

[0087] Activin A (SEQ ID NO: 7), as used in the present invention, means Activin beta-A chain, EDF, Erythroid differentiation protein, FRP, FSH-releasing protein, INHBA, Inhibin beta-A chain, Inhibin beta-1. The protein encoded by this gene is a member of the transforming growth factor beta (TGF-β) family of proteins produced by pluripotent stem cells, endoderm, and mesoderm.

[0088] BMP4 (SEQ ID NO: 8), as used in the present invention, means bone morphogenetic protein 4, also known as ZYME, BMP2B or BMP2B1. The protein encoded by this gene is a member of the bone morphogenetic protein family, which is part of the transforming growth factor-beta superfamily.

[0089] FGF (SEQ ID NO: 9), as used in the present invention means fibroblast growth factor. The protein encoded by this gene is a member of a family of cell signaling proteins as described in e.g. Hui et al., 2018.

[0090] VEGF-A (SEQ ID NO: 10), as used in the present invention, means vascular endothelial growth factor A also known as VPF, VEGF or MVCD1. The protein encoded by this gene is a member of the PDGF/VEGF growth factor family and a heparin-binding protein. This growth factor induces proliferation and migration of vascular endothelial cells, and is essential for both physiological and pathological angiogenesis.

[0091] LY294002, as used in the present invention, means a potent, cell permeable inhibitor of phosphatidylinositol 3-kinase (PI3K) that acts on the ATP binding site of the enzyme (Vlahos et al., 1994). The chemical structure thereof is given in the following:

[chemical structure]

[0092] CHIR99021, as used in the present invention, means an amino pyrimidine derivative that is an extremely potent inhibitor of glycogen synthase kinase 3, inhibiting GSK3β (IC₅₀=6.7 nM) and GSK3α (IC₅₀=10 nM) and functions as a WNT activator. The chemical structure thereof is given in the following:

[chemical structure]

[0093] SCF (SEQ ID NO: 11), as used in the present invention, means Stem cell factor also known as Kit ligand, Mast cell growth factor or Steel factor. The protein encoded by this gene is an early-acting cytokine that plays a pivotal role in the regulation of embryonic and adult hematopoiesis.

[0094] IL-3 (SEQ ID NO: 12), as used in the present invention, means Interleukin-3, MCGF (Mast cell growth factor), Multi-CSF, HCGF, P-cell stimulation factor, MGC79398 or MGC79399. The protein encoded by this gene is a growth promoting cytokine.

[0095] IL-6 (SEQ ID NO: 13), as used in the present invention, means Interleukin 6 also known as B-Cell Stimulatory Factor 2, CTL Differentiation Factor, Hybridoma Growth Factor, Interferon Beta-2, Interleukin-6, IFN-βeta-2, IFNB2, BSF-2, CDF, Interferon, Beta 2, B-Cell Differentiation Factor, Interferon, Beta 2, Interleukin BSF-2, BSF2, HGF, or HSF. The protein encoded by this gene is a cytokine that functions in inflammation and the maturation of B cells.

[0096] CSF1 (SEQ ID NO: 14), as used in the present invention, means Colony Stimulating Factor 1 also known as Colony Stimulating Factor 1 (Macrophage), Macrophage Colony-Stimulating Factor 1, Macrophage Colony Stimulating Factor 1, Lanimostim, CSF-1, MCSF, M-CSF and the protein encoded by this gene is a cytokine that controls the production, differentiation, and function of macrophages.

[0097] IL-34 (SEQ ID NO: 15), as used in the present invention, means Interleukin 34, also known as C16 or f77. The protein encoded by this gene is a cytokine that promotes the differentiation and viability of monocytes and macrophages through the colony-stimulating factor-1 receptor.

[0098] CSF2 (SEQ ID NO: 16), as used in the present invention, means Colony Stimulating Factor 2 also known as Sargramostim, Colony Stimulating Factor 2 (Granulocyte-Macrophage), Granulocyte-Macrophage Colony-Stimulating Factor, Molgramostin, Molgramostim, GMCSF, CSF, Granulocyte Macrophage-Colony Stimulating Factor, Granulocyte-Macrophage Colony Stimulating Factor, Colony-Stimulating Factor, GM-CSF. The protein encoded by this gene is a cytokine that controls the production, differentiation, and function of granulocytes and macrophages.

[0099] CD200 (SEQ ID NO: 17), as used in the present invention, means the CD200 Gene also known as CD200 Molecule, CD200 Antigen, Antigen Identified by Monoclonal Antibody MRC OX-2, OX-2 Membrane Glycoprotein, MOX1, MOX2, OX-2 or MRC. The protein encoded by this gene is a type I membrane glycoprotein containing two extracellular immunoglobulin domains, a transmembrane and a cytoplasmic domain.

[0100] CX3CL1 (SEQ ID NO: 18), as used in the present invention, means the CX3CL1 Gene also known as C-X3-C Motif Chemokine Ligand 1, Small Inducible Cytokine Subfamily D (Cys-X3-Cys), Member 1 (Fractalkine, Neurotactin), Chemokine (C-X3-C Motif) Ligand 1, CX3C Membrane-Anchored Chemokine, Small-Inducible Cytokine D1, C-X3-C Motif Chemokine 1, Neurotactin, Fractalkine, or SCYD1, NTT, Small Inducible Cytokine Subfamily D (Cys-X3-Cys), Member-1, C3Xkine, ABCD-3, CXC3C, CXC3, NTN or FKN. The protein encoded by this gene belongs to the CX3C subgroup of chemokines, characterized by the number of amino acids located between the conserved cysteine residues.

[0101] TGFβ1 (SEQ ID NO: 19), as used in the present invention, means the Transforming Growth Factor Beta 1, also known as Transforming Growth Factor Beta-1 Proprotein, Prepro-Transforming Growth Factor Beta-1, TGFB, Transforming Growth Factor, Beta 1, Transforming Growth Factor Beta-1, Latency-Associated Peptide, Camurati-Engelmann Disease, TGF-Beta-1, IBDIMDE, TGFbeta, DPD1, CED or LAP. The protein encoded by this gene is a secreted ligand of the TGF-beta (transforming growth factor-beta) superfamily of proteins.

[0102] In a further embodiment of the method of the present invention, the at least one growth factor is CSF1 (SEQ ID NO: 14) or IL-34 (SEQ ID NO: 15). In a further embodiment of the method of the present invention, the at least one growth factor is CSF1 (SEQ ID NO: 14). In a further embodiment of the method of the present invention, the at least one growth factor is IL-34 (SEQ ID NO: 15).

[0103] In an additional embodiment of the method of the present invention, the at least one small molecule is CHIR99021, LY294002 or IDE1.

[0104] LY294002, as used in the present invention, means a potent, cell permeable inhibitor of phosphatidylinositol 3-kinase (PI3K) that acts on the ATP binding site of the enzyme (Vlahos et al., 1994). The chemical structure thereof is given in the following:

[chemical structure]

[0105] CHIR99021, as used in the present invention, means an amino pyrimidine derivative that is a potent inhibitor of glycogen synthase kinase 3, inhibiting GSK3β (IC₅₀=6.7 nM) and GSK3α (IC₅₀=10 nM) and functions as a WNT activator. The chemical structure thereof is given in the following:

[chemical structure]

[0106] IDE1, as used in the present invention, means inducer of definitive endoderm; a small molecule that activates the TGF-beta pathway and could be used as a replacement of the growth factor TGF-beta. The chemical structure thereof is given in the following:

[chemical structure]

[0107] In another embodiment of the method of the present invention, the first and the second genomic safe harbour sites are different.

[0108] In a further embodiment of the method of the present invention, the method further comprises insertion of the coding sequence of the gene of the transcription factor CEBPB (SEQ ID NO: 3) and expression thereof.

[0109] CEBPB (SEQ ID NO: 3) as used in the present invention means CCAAT Enhancer Binding Protein Beta also known as CCAAT Enhancer Binding Protein Beta, CCAAT/Enhancer Binding Protein (C/EBP), Beta, Interleukin 6-Dependent DNA-Binding Protein, CCAAT/Enhancer-Binding Protein Beta, Nuclear Factor of Interleukin 6, Transcription Factor 5, Nuclear Factor NF-IL6, TCF5, Liver-Enriched Transcriptional Activator Protein, CCAAT/Enhancer Binding Protein Beta, Liver-Enriched Inhibitory Protein, Transcription Factor C/EBP Beta, Liver Activator Protein, C/EBP-Beta, C/EBP Beta, IL6DBP, NF-IL6, TCF-5, LAP or LIP. This intronless gene encodes a transcription factor that contains a basic leucine zipper (bZIP) domain.

[0110] In another embodiment of the method of the present invention, the method further comprises insertion of the coding sequence of the gene of the transcription factor RUNX1 (SEQ ID NO: 4) and expression thereof.

[0111] RUNX1 (SEQ ID NO: 4) as used in the present invention means Runt Related Transcription Factor 1, Runt-Related Transcription Factor 1, Polyomavirus Enhancer-Binding Protein 2 Alpha B Subunit, SL3/AKV Core-Binding Factor Alpha B Subunit, SL3-3 Enhancer Factor 1 Alpha B Subunit, Acute Myeloid Leukemia 1 Protein, Oncogene AML-1, PEBP2-Alpha B, PEA2-Alpha B, CBFA2, AML1, Core-Binding Factor Runt Domain Alpha Subunit 2 Core-Binding Factor Subunit Alpha-2, AML1-EVI-1 Fusion Protein, Acute Myeloid Leukemia, Aml1 Oncogene, CBF-Alpha-2, AML1-EVI-1, PEBP2alpha, CBF2alpha, PEBP2aB, AMLCR1 or EVI-1. The protein encoded by this gene represents the alpha subunit of CBF and is thought to be involved in the development of normal hematopoiesis.

[0112] In a further embodiment of the method of the present invention, the method further comprises insertion of the coding sequence of the gene of the transcription factor IRF8 (SEQ ID NO: 5) and expression thereof.

[0113] IRF8 (SEQ ID NO: 5) as used in the present invention means Interferon Regulatory Factor 8, also known as Interferon Consensus Sequence Binding Protein 1, H-ICSBP, ICSBP1, ICSBP, IRF-8, Interferon Consensus Sequence-Binding Protein, IMD32A, IMD32B or Interferon consensus sequence-binding protein (ICSBP). It is a transcription factor of the interferon (IFN) regulatory factor (IRF) family.

[0114] In another embodiment of the method of the present invention, the method further comprises insertion of the coding sequence of the gene of the transcription factor SALL1 (SEQ ID NO: 6) and expression thereof.

[0115] SALL1 (SEQ ID NO: 6), as used in the present invention, means Spalt Like Transcription Factor 1, also known as Zinc Finger Protein Spalt-1, Zinc Finger Protein SALL1, Zinc Finger Protein 794, Sal-Like Protein 1, ZNF794, Sal-1, Epididymis Secretory Protein Li 89, Spalt-Like Transcription Factor 1, Sal (Drosophila)-Like 1, Sal-Like 1 (Drosophila), HEL-S-89, HSAL1, HSal1, SAL1 or TBS. The protein encoded by this gene is a zinc finger transcriptional repressor and may be part of the NuRD histone deacetylase complex (HDAC).

[0116] In an additional embodiment of the method of the present invention, the transcriptional regulator protein is the reverse tetracycline transactivator (rtTA) (SEQ ID NO: 20) and the activity thereof is controlled by doxycycline or tetracycline.

[0117] As used within the present invention, the term “reverse tetracycline transactivator (rtTA)” means a transcriptional activator protein induced by tetracycline or a derivate thereof. Tetracycline-controlled transcriptional activation is a method of inducible gene expression where transcription is reversibly turned on or off in the presence of the antibiotic tetracycline or one of its derivatives (e.g. doxycycline, which is more stable). In this system, the transcriptional activator protein may be tetracycline-responsive transcriptional activator protein (rtTa) or a derivative thereof. The transcriptional regulator protein of the present invention may be an rtTA. The rtTA protein is able to bind to DNA at specific TetO operator sequences. Several repeats of such TetO sequences are placed upstream of a minimal promoter (such as the CMV promoter), which together form a tetracycline response element (TRE) (SEQ ID NO: 21). There are two forms of this system, depending on whether the addition of tetracycline or a derivative activates (Tet-On) or deactivates (Tet-Off) the rtTA protein. The Tet-ON system, in which doxycycline activates the rtTA protein, may also be used in one embodiment of the method of the present invention.

[0118] The Tet-On system is composed of two components; (1) the constitutively expressed tetracycline-responsive transcriptional activator protein (rtTA) and the rtTA sensitive inducible promoter (Tet Responsive Element, TRE). This may be bound by tetracycline or its more stable derivatives, including doxycycline (dox), resulting in activation of rtTA, allowing it to bind to TRE sequences and inducing expression of TRE-controlled genes. The use of this may be preferred in the method of the present invention. Thus, the transcriptional regulator protein of the method of the present invention may be the tetracycline-responsive transcriptional activator protein (rtTA), which can be activated or deactivated by the antibiotic tetracycline or one of its derivatives, which are supplied exogenously. If the transcriptional regulator protein is rtTA, then the inducible promoter inserted into the second GSH site includes the tetracycline response element (TRE). The exogenously supplied substance may be the antibiotic tetracycline or one of its derivatives, like doxycycline, preferably tetracycline or doxycycline.

[0119] Variants and modified rtTA proteins may be used in the method of the present invention. These may include Tet-On Advanced transactivator (also known as rtTA2S-M2) and Tet-On 3G (also known as rtTA-V16, derived from rtTA2S-S2).

[0120] In another embodiment of the method of the present invention, the inducible promoter includes a Tet Responsive Element (TRE) (SEQ ID NO: 21).

[0121] As used within the present invention, the term “Tet Responsive Element (TRE)” means a bacterial TetO sequence of 7 repeats of 19 bp separated by spacer sequences, together with a minimal promoter. Variants and modifications of the TRE sequence are possible, since the minimal promoter can be any suitable promoter. Preferably, the minimal promoter shows no or minimal expression levels in the absence of rtTA binding. The inducible promoter inserted into the second GSH may thus comprise a TRE. The basic genetic principal underlying the present invention is also depicted in FIG. 2, showing the different GSH sites (hROSA26 and AAVS1), and the integrated rtTA (SEQ ID NO: 20) and TRE (SEQ ID NO: 21).

[0122] In a further embodiment of the method of the present invention, said first and said second genomic safe harbour sites are selected from the group consisting of the hROSA26 locus (SEQ ID NO: 22), the AAVS1 locus (SEQ ID NO: 23), the CLYBL gene (SEQ ID NO: 24), the CCR5 gene (SEQ ID NO. 25), the HPRT gene (SEQ ID NO. 26) or genes with the site ID 325 on chromosome 8 (SEQ ID NO: 27), site ID 227 on chromosome 1 (SEQ ID NO: 28), site ID 229 on chromosome 2 (SEQ ID NO: 29), site ID 255 on chromosome 5 (SEQ ID NO: 30), site ID 259 on chromosome 14 (SEQ ID NO: 31), site ID 263 on chromosome X (SEQ ID NO: 32), site ID 303 on chromosome 2 (SEQ ID NO: 33), site ID 231 on chromosome 4 (SEQ ID NO: 34), site ID 315 on chromosome 5 (SEQ ID NO: 35), site ID 307 on chromosome 16 (SEQ ID NO: 36), site ID 285 on chromosome 6 (SEQ ID NO: 37), site ID 233 on chromosome 6 (SEQ ID NO: 38), site ID 311 on chromosome 134 (SEQ ID NO: 39), site ID 301 on chromosome 7 (SEQ ID NO: 40), site ID 293 on chromosome 8 (SEQ ID NO: 41), site ID 319 on chromosome 11 (SEQ ID NO: 42), site ID 329 on chromosome 12 (SEQ ID NO: 43), site ID 313 on chromosome X (SEQ ID NO: 44). Preferably, in a further embodiment of the method of the present invention, said first and said second genomic safe harbour sites are selected from the group consisting of the hROSA26 locus (SEQ ID NO: 22), the AAVS1 locus (SEQ ID NO: 23), the CLYBL gene (SEQ ID NO: 24), the CCR5 gene (SEQ ID NO. 25), the HPRT gene (SEQ ID NO. 26). More preferably, said first and said second genomic safe harbour sites are selected from the group consisting of the hROSA26 locus (SEQ ID NO: 22) and the AAVS1 locus (SEQ ID NO: 23).

[0123] Further sites may be identified by looking for sites where viruses naturally integrate without disrupting natural gene expression. For the method of the present invention, several GSH sites may be used, which will be described in more detail in the following.

[0124] The adeno-associated virus integration site 1 locus (AAVS1) (SEQ ID NO: 23) is located within the protein phosphatase 1, regulatory subunit 12C (PPP1R12C) gene on human chromosome 19, which is expressed uniformly and ubiquitously in human tissues. This site serves as a specific integration locus for AAV serotype 2, and thus was identified as a possible GSH. AAVS1 has been shown to be a favourable environment for transcription, since it comprises an open chromatin structure and native chromosomal insulators that enable resistance of the inducible cassettes against silencing. There are no known adverse effects on a cell resulting from disruption of the PPP1R12C gene. Moreover, an inducible cassette inserted into this site remains transcriptionally active in many diverse cell types. AAVS1 is thus considered to be a GSH and has been widely utilized for targeted transgenesis in the human genome.

[0125] The hROSA26 site (SEQ ID NO: 22) has been identified on the basis of sequence analogy with a GSH from mice (ROSA26—reverse oriented splice acceptor site #26). Although the orthologue site has been identified in humans, this site is not commonly used for inducible cassette insertion. The inventors of the present invention have used a targeting system specifically for the hROSA26 site and thus were able to insert genetic material into this locus. The hROSA26 locus (SEQ ID NO: 22) is on chromosome 3 (3p25.3), and can be found within the Ensembl database (GenBank: CR624523). The exact genomic co-ordinates of the integration site are 3:9396280-9396303: Ensembl. The integration site lies within the open reading frame (ORF) of the THUMPD3 long non-coding RNA (reverse strand). Since the hROSA26 site has an endogenous promoter, the inserted genetic material may take advantage of that endogenous promoter, or alternatively, may be inserted operably linked to a promoter.

[0126] Intron 2 of the Citrate Lyase Beta-like (CLYBL) gene (SEQ ID NO: 24), on the long arm of Chromosome 13, was identified as a suitable GSH since it is one of the identified integration hot-spots of the phage derived phiC31 integrase. Studies have demonstrated that randomly inserted inducible cassettes into this locus are stable and expressed. It has been shown that insertion of inducible cassettes at this GSH does not perturb local gene expression (Cerbibi et al., 2015). CLYBL thus provides a GSH which may be used in the method of the present invention.

[0127] CCR5 (SEQ ID NO: 25), which is located on chromosome 3 (position 3p21.31) is a gene, which codes for HIV-1 major co-receptor. Interest in the use of this site as a GSH arises from the null mutation in this gene that appears to have no adverse effects, but predisposes to HIV-1 infection resistance. Zinc-finger nucleases that target the third exon have been developed, thus allowing for insertion of genetic material at this locus. Given that the natural function of CCR5 has yet to be elucidated, the site remains a putative GSH, which may be used in the method of the present invention. The hypoxanthine-guanine phosphoribosyl transferase (HPRT) gene encodes a transferase enzyme that plays a central role in the generation of purine nucleotides through the purine salvage pathway. It has been mooted as a GSH site. Insertions at this site may be more applicable for mature cell types, such as modification for gene therapy. GSH in other organisms have been identified and include ROSA26, HRPT and HippII (HII) loci in mice.

[0128] Mammalian genomes may include GSH sites based upon pseudo attP sites. For such sites, hiC31 integrase, the Streptomyces phage-derived recombinase, has been developed as a non-viral insertion tool, because it has the ability to integrate an inducible cassette-containing plasmid carrying an attB site into pseudo attP sites. GSH are also present in the genomes of plants, and modification of plant cells can be used in the method of the present invention. GSH have been identified in the genomes of rice (Cantos et al., 2014).

[0129] The following SHS sites may be used in any of the methods of the present invention. They were published by Pellenz et al., 2019, and fulfil five out of nine criteria listed above: Site ID 325 on chromosome 8:68,720,172-68,720,191 (SEQ ID NO: 27); site ID 227 on chromosome 1:231,999,396-231,999,415 (SEQ ID NO: 28); site ID 229 on chromosome 2:45,708,354-45,708,373 (SEQ ID NO: 29); site ID 255 on chromosome 5:19,069,307-19,069,326 (SEQ ID NO: 30); site ID 259 on chromosome 14:92,099,558-92,099,577 (SEQ ID NO: 31); site ID 263 on chromosome X:12,590,812-12,590,831 (SEQ ID NO: 32); site ID 303 on chromosome 2:77,263,930-77,263,949 (SEQ ID NO: 33); site ID 317 on chromosome 2:77,263,930-77,263,949 (SEQ ID NO: 60); site ID 231 on chromosome 4:58,976,613-58,976,632 (SEQ ID NO: 34); site ID 315 on chromosome 5:7,577,728-7,577,747 (SEQ ID NO: 35); site ID 307 on chromosome 16:19,323,777-19,323,796 (SEQ ID NO: 36); site ID 285 on chromosome 6:89,574,320-89,574,339 (SEQ ID NO: 37); site ID 233 on chromosome 6:114,713,905-114,713,924 (SEQ ID NO: 38); site ID 311 on chromosome 6:134,385,946-134,385,965 (SEQ ID NO: 39); site ID 301 on chromosome 7:113,327,685-113,327,704 (SEQ ID NO: 40); site ID 293 on chromosome 8:40,727,927-40,727,946 (SEQ ID NO: 41); site ID 319 on chromosome 11:32,680,546-32,680,565 (SEQ ID NO: 42); site ID 329 on chromosome 12:126,152,581-126,152,600 (SEQ ID NO: 43); and site ID 313 on chromosome X:16,059,732-16,059,751 (SEQ ID NO: 44).

[0130] In another embodiment of the method of the present invention, said stem cell is a pluripotent stem cell, an induced pluripotent stem cell (iPSC), a neural progenitor cell, hematopoietic stem cell or an embryonic stem cell (ESC).

[0131] Within the present invention, the term “pluripotent stem cell” is used as defined above.

[0132] As used within the present invention, the term “neural progenitor cell” means a multipotent cell state between pluripotent stem cell and mature somatic cell. This cell state is usually determined to become a specialized cell type like neurons, oligodendrocytes and astrocytes.

[0133] Within the present invention, the term “induced pluripotent stem cell (iPSC)” is used as defined above.

[0134] As used within the present invention, the term “hematopoietic stem cell” means a blood forming stem cell. This special type of multipotent stem cell is able to form any type of blood cell, but lost the capacity to form other cell types.

[0135] Within the present invention, the term “embryonic stem cell (ESC)” is used as defined above.

[0136] In a further embodiment of the method of the present invention, said stem cell is a human or a mouse stem cell.

[0137] As used within the present invention, the term “human or a mouse stem cell” means a cell originated from human or mouse. However, the stem cell used in the method of the present invention may be any human or animal cell. It is preferably a mammalian cell, such as a cell from a rodent, such as mice and rats; marsupial such as kangaroos and koalas; non-human primate such as a bonobo, chimpanzee, lemurs, gibbons and apes; camelids such as camels and llamas; livestock animals such as horses, pigs, cattle, buffalo, bison, goats, sheep, deer, reindeer, donkeys, bantengs, yaks, chickens, ducks and turkeys; domestic animals, such as cats, dogs, rabbits and guinea pigs. The cell is preferably a human cell. In certain aspects, the cell is preferably one from a livestock animal. The type of cell used in the method of the present invention will depend upon the application of the cell once insertion of the genetic material into the GSH sites is complete.

[0138] The present invention also relates to a microglia cell obtained by any of the methods according to the present invention, preferably wherein the microglia expresses at least one microglia surface protein selected from the group consisting of ITGAM (CD11B) (SEQ ID NO: 45), ITGAX (CD11C) (SEQ ID NO: 46), CD14 (SEQ ID NO: 47), CD16 (SEQ ID NO: 48), ENTPD1 (CD39) (SEQ ID NO: 49), PTPRC (CD45) (SEQ ID NO: 50), CD68 (SEQ ID NO: 51), CSF1R (CD115) (SEQ ID NO: 52), CD163 (SEQ ID NO: 53), CX3CR1 (SEQ ID NO: 54), TREM2 (SEQ ID NO: 55), P2RY12 (SEQ ID NO: 56), TMEM119 (SEQ ID NO: 57), and HLA-DR (SEQ ID NO: 58).

[0139] Thus, microglia are additionally defined by expressing at least one of the following surface proteins ITGAM (CD11B) (SEQ ID NO: 45), ITGAX (CD11C) (SEQ ID NO: 46), CD14 (SEQ ID NO: 47), CD16 (SEQ ID NO: 48), ENTPD1 (CD39) (SEQ ID NO: 49), PTPRC (CD45) (SEQ ID NO: 50), CD68 (SEQ ID NO: 51), CSF1R (CD115) (SEQ ID NO: 52), CD163 (SEQ ID NO: 53), CX3CR1 (SEQ ID NO: 54), TREM2 (SEQ ID NO: 55), P2RY12 (SEQ ID NO: 56), TMEM119 (SEQ ID NO: 57), and HLA-DR (SEQ ID NO: 58). These proteins are defined as follows.

[0140] ITGAM (CD11B), as used in the present invention, means Integrin Subunit Alpha M, a gene which encodes the integrin alpha M chain. Integrins are heterodimeric integral membrane proteins composed of an alpha chain and a beta chain. The protein sequence thereof is given in SEQ ID NO: 45.

[0141] ITGAX (CD11C), as used within the present invention, means Integrin Subunit Alpha X, and the gene encodes the integrin alpha X chain protein. The protein sequence thereof is given in SEQ ID NO: 46.

[0142] CD14, as used in the present invention, means Monocyte Differentiation Antigen CD14 and the protein encoded by this gene is a surface antigen that is preferentially expressed on monocytes/macrophages. The protein sequence thereof is given in SEQ ID NO: 47.

[0143] CD16, as used in the present invention, means FCGR3A Fc Fragment of IgG Receptor IIIa and this gene encodes a receptor for the Fc portion of immunoglobulin G, and it is involved in the removal of antigen-antibody complexes from the circulation, as well as other antibody-dependent responses. The protein sequence thereof is given in SEQ ID NO: 48.

[0144] ENTPD1 (CD39), as used in the present invention, means Ectonucleoside Triphosphate Diphosphohydrolase 1 and the protein encoded by this gene is a plasma membrane protein that hydrolyzes extracellular ATP and ADP to AMP. The protein sequence thereof is given in SEQ ID NO: 49.

[0145] PTPRC (CD45), as used in the present invention, means Protein Tyrosine Phosphatase Receptor Type C and the protein encoded by this gene is a member of the protein tyrosine phosphatase (PTP) family. The protein sequence thereof is given in SEQ ID NO: 50.

[0146] CD68, as used in the present invention, means CD68 Antigen and this gene encodes a 110-kD transmembrane glycoprotein that is highly expressed by human monocytes and tissue macrophages. The protein sequence thereof is given in SEQ ID NO: 51.

[0147] CSF1R (CD115), as used in the present invention, means Colony Stimulating Factor 1 Receptor and the protein encoded by this gene is the receptor for colony stimulating factor 1, a cytokine which controls the production, differentiation, and function of macrophages. The protein sequence thereof is given in SEQ ID NO: 52.

[0148] CD163, as used in the present invention, means CD163 Antigen and the protein encoded by this gene is a member of the scavenger receptor cysteine-rich (SRCR) superfamily, and is exclusively expressed in monocytes and macrophages. The protein sequence thereof is given in SEQ ID NO: 53.

[0149] CX3CR1, as used in the present invention, means C-X3-C Motif Chemokine Receptor 1 and the protein encoded by this gene is a receptor for fractalkine. The protein sequence thereof is given in SEQ ID NO: 54. Fractalkine is a transmembrane protein and chemokine involved in the adhesion and migration of leukocytes.

[0150] TREM2, as used in the present invention, means Triggering Receptor Expressed On Myeloid Cells 2 and this gene encodes a membrane protein that forms a receptor signaling complex with the TYRO protein tyrosine kinase binding protein. The protein sequence thereof is given in SEQ ID NO: 55.

[0151] P2RY12, as used in the present invention, means Purinergic Receptor P2Y12 and the product of this gene belongs to the family of G-protein coupled receptors. The protein sequence thereof is given in SEQ ID NO: 56.

[0152] TMEM119, as used in the present invention, means Transmembrane Protein 119, which is a protein coding gene. Among its related pathways are microglia activation during neuroinflammation. The protein sequence thereof is given in SEQ ID NO: 57.

[0153] HLA-DR, as used in the present invention, means Major Histocompatibility Complex, Class II, DR Alpha and Beta and both HLA-DRA and HLA-DRB1 are HLA class II alpha chain paralogues. The protein sequence thereof is given in SEQ ID NO: 58.

[0154] In a further embodiment, the present invention also comprises the microglia cell according to the present invention for use in therapy.

[0155] As used in the present invention, the term “therapy” means any form of treatment of diseases or unwanted health status of organisms, animals or human beings. It may also include gene therapy. This may be defined as the intentional insertion of foreign DNA into the nucleus of a cell with therapeutic intent. Such a definition includes the provision of a gene or genes to a cell to provide a wild type version of a faulty gene, the addition of genes for RNA molecules that interfere with target gene expression (which may be defective), provision of suicide genes (such as the enzymes herpes simplex virus, thymidine kinase (HSV-tk) and cytosine deaminase (CD), which convert the harmless prodrug ganciclovir (GCV) into a cytotoxic drug, DNA vaccines for immunization or cancer therapy (including cellular adoptive immunotherapy) and any other provision of genes to a cell for therapeutic purposes. Additionally, the mature microglia may be used directly for transplantation into a human or animal body. Alternatively, the microglia may form a test material for research, including the effects of drugs on gene expression and the interaction of drugs with a particular gene. The microglia for research can involve the use of an inducible cassette with a genetic sequence of unknown function, in order to study the controllable expression of that genetic sequence. Additionally, it may enable the microglia to be used to produce large quantities of desirable materials, such as growth factors or cytokines.

[0156] Further, the present invention is also directed in one embodiment to the use of such a microglia cell according to the present invention for in vitro diagnostics of a disease. Preferably, the disease is selected from the group consisting of diseases of the central nervous system, preferably neurodegenerative diseases; more preferably Alzheimer's disease, Parkinson's disease, frontotemporal dementia or Amyotrophic Lateral Sclerosis; neuroinflammatory or autoimmune diseases, preferably Multiple Sclerosis, auto-antibody-mediated encephalitis or infectious diseases, neurovascular diseases; preferably stroke, vasculitis; traumatic brain injury, and cancer.

[0157] Further, the present invention is directed to the use of such a microglia cell according to the present invention for in vitro culturing with brain organoids.

[0158] As used within the present invention, the term “organoid” means (mostly stem) cell-derived in vitro 3D-organ models and represent in combination with the microglia produced according to this invention a powerful tool for medical diagnostics to study the involvement and interaction of microglia with other cells of the brain.

[0159] It is noted that as used herein, the singular forms “a”, “an”, and “the”, include plural references unless the context clearly indicates otherwise. Thus, for example, reference to “a reagent” includes one or more of such different reagents and reference to “the method” includes reference to equivalent steps and methods known to those of ordinary skill in the art that could be modified or substituted for the methods described herein.

[0160] Unless otherwise indicated, the term “at least” preceding a series of elements is to be understood to refer to every element in the series. The term “at least one” refers, if not particularly defined differently, to one or more such as two, three, four, five, six, seven, eight, nine, ten or more. Those skilled in the art will recognize, or be able to ascertain using no more than routine experimentation, many equivalents to the specific embodiments of the invention described herein. Such equivalents are intended to be encompassed by the present invention.

[0161] The term “and/or” wherever used herein includes the meaning of “and”, “or” and “all or any other combination of the elements connected by said term”.

[0162] The term “less than” or in turn “more than” does not include the concrete number.

[0163] For example, less than 20 mean less than the number indicated. Similarly, “more than” or “greater than” means more than or greater than the indicated number, e.g. more than 80% means more than or greater than the indicated number of 80%.

[0164] Throughout this specification and the claims which follow, unless the context requires otherwise, the word “comprise”, and variations such as “comprises” and “comprising”, will be understood to imply the inclusion of a stated integer or step or group of integers or steps, but not the exclusion of any other integer or step or group of integer or step. When used herein the term “comprising” can be substituted with the term “containing” or “including” or sometimes when used herein with the term “having”. When used herein “consisting of” excludes any element, step, or ingredient not specified.

[0165] The term “including” means “including but not limited to”. “Including” and “including but not limited to” are used interchangeably.

[0166] The term “about” means plus or minus 10%, preferably plus or minus 5%, more preferably plus or minus 2%, most preferably plus or minus 1%.

[0167] Throughout the description and claims of this specification, the singular encompasses the plural unless the context otherwise requires. In particular, where the indefinite article is used, the specification is to be understood as contemplating plurality as well as singularity, unless the context requires otherwise.

[0168] It should be understood that this invention is not limited to the particular methodology, protocols, material, reagents, and substances, etc., described herein and as such can vary. The terminology used herein is for the purpose of describing particular embodiments only, and is not intended to limit the scope of the present invention, which is defined solely by the claims.

[0169] All publications cited throughout the text of this specification (including all patents, patent application, scientific publications, instructions, etc.), whether supra or infra, are hereby incorporated by reference in their entirety. Nothing herein is to be construed as an admission that the invention is not entitled to antedate such disclosure by virtue of prior invention. To the extent the material incorporated by reference contradicts or is inconsistent with this specification, the specification will supersede any such material.

[0170] The content of all documents and patent documents cited herein is incorporated by reference in their entirety.

[0171] A better understanding of the present invention and of its advantages will be gained from the following examples, offered for illustrative purposes only. The examples are not intended to limit the scope of the present invention in any way.

### EXAMPLES OF THE INVENTION

[0172] The following Examples illustrate the invention, but are not to be construed as limiting the scope of the invention.

### Example 1

[0173] Material and Methods

[0174] For initial screening experiments, first an hROSA-CAG-rtTA hiPSC-line (nucleofection of three plasmids expressing a CAS9-nickase, two hROSA26-specific guideRNAs (SEQ ID NO: 66 and SEQ ID NO: 67) and the donor plasmid with the CAG-rtTA expression cassette as demonstrated in FIG. 2A and FIG. 4A; antibiotic selection, clonal expansion and characterization of individual clonal hiPSC-colonies) was generated and subsequent transient transfection of the four AAVS1 targeting vectors (SEQ ID NOs: 61 to SEQ ID NO: 64) (see also FIG. 4B-E) was performed allowing for quick overexpression of PU.1 (SEQ ID NO: 2) either alone or in combination with either of the three other transcription factors RUNX1 (SEQ ID NO: 4), CEBPB (SEQ ID NO: 3), or IRF8 (SEQ ID NO: 5) in the form of a bi-cistronic expression cassette (FIG. 4B-E) (SEQ ID NO: 61 to SEQ ID NO. 64). For screening purpose, targeted cells were not clonally expanded, resulting in overexpression only in a subset of cells.

[0175] Surprisingly, initial screening experiments demonstrated rapid induction of myeloid and microglia lineage marker in all three cell lines expressing PU.1 (SEQ ID NO: 2) plus any of the other three candidate reprogramming factors, but not in wild-type control hiPSCs or in cells expressing PU.1 (SEQ ID NO: 2) alone.

[0176] Description

[0177] To develop a prototype protocol and establish suitable read-out parameters, the inventors decided to focus on the combinatorial overexpression of PU.1 (SEQ ID NO: 2) and CEBPB (SEQ ID NO: 3). Thus, fully verified dual GSH targeted inducible PU.1+CEBPB hiPSCs were created and clonally expanded.

[0178] Observation

[0179] Addition of doxycycline resulted in the rapid loss of expression of the pluripotency markers OCT4 (SEQ ID NO: 78) and NANOG (SEQ ID NO: 79) and induction of both transgenes in all cells (see FIG. 6).

### Example 2

[0180] Material and Methods

[0181] In brief, hiPSCs were plated as single cells onto Matrigel in pluripotency maintenance medium. After two days, the media is changed to Dulbecco's modified eagle medium (DMEM)/F12 supplemented with dox for transgene induction plus small molecules and growth factors mimicking the sequence of embryonic events outlined above. After three days of induction, the adherent cells started to delaminate from the tissue culture plate and were found as floating single cells in the supernatant.

[0182] Description

[0183] Subsequently, the inventors performed longer screening experiments in which cells were induced for up to 20 days for optimisation of media compositions. Multi-colour flow cytometry demonstrated a remarkably robust and rapid induction of myeloid cell surface markers that were chosen as screening panel for the induction of primitive macrophages and/or microglia (CD11b (SEQ ID NO: 45), CD14 (SEQ ID NO: 47), CD45 (SEQ ID NO: 50), CD163 (SEQ ID NO: 53), CX3CR1 (SEQ ID NO: 54)). The inventors also noted important culture condition-dependent differences: Induction occurred most rapidly and efficiently when the transcription factor overexpression was performed in conjunction with timed exposure to extracellular cues (small molecules, growth factors) mimicking the sequence of embryonic development: (1) patterning of the pluripotent epiblast (hiPSCs) towards (posterior primitive streak) extra-embryonic mesoderm and the haemangioblast, (2) induction of primitive haematopoiesis and early macrophage precursors, (3) differentiation into primitive yolk sac macrophages, (4) differentiation into microglia (see FIG. 5).

[0184] Observation

[0185] The cells rapidly started to express typical myeloid surface proteins including CD45 (SEQ ID NO: 50) (also known as PTPRC), CD11b (SEQ ID NO: 45) (also known as ITGAM), CD14 (SEQ ID NO: 47), and CX3CR1 (SEQ ID NO: 54) as demonstrated by flow cytometry (see FIG. 5B-C). By day 10, all cells had transitioned into the supernatant and were plated down onto poly-L-lysine (PLL) coated tissue culture dishes in final, chemically-defined microglia differentiation and maintenance medium, according to Muffat et al., 2016. Interestingly, differentiation into microglia occurred even more efficiently when doxycycline was withdrawn after day ten of the induction protocol, thus unequivocally demonstrating the independence of the cellular phenotype from continued transgene expression.

[0186] After 6-10 days of transgene-free differentiation and maturation in adhesion culture, virtually all cells expressed a wide range of common myeloid and more microglia specific proteins, including CD39 (SEQ ID NO: 49), P2RY12 (SEQ ID NO: 56), TREM2 (SEQ ID NO: 55), and TMEM119 (SEQ ID NO: 57) as quantified by flow cytometry (see FIG. 5c) or demonstrated by immunocytochemistry (see FIG. 5D). Next, co-culture experiments were performed in which the inventors plated microglia precursors onto a pure population of isogenic hiPSC-derived cortical neurons generated according to previously published protocol according to Zhang et al., 2013, and Pawlowski et al., 2017. Microglial cells acquired a more ramified (i.e. less activated) morphology compared to cells in monoculture (see FIG. 5E). Real-time qPCR analysis of hiPSCs and microglia in monoculture demonstrated downregulation of pluripotency factors, MYB-independence (in line with the primitive yolk sac macrophage origin of microglia), and high expression of core microglia transcription factors, classical surface markers, and recently suggested unique microglial signature genes (see FIG. 5F).

### REFERENCES

[0187] Abud E M, Ramirez R N, Martinez E S, Healy L M, Nguyen C H H, Newman S A, Yeromin A V, Scarfone V M, Marsh S E, Fimbres C, et al.: iPSC-Derived Human Microglia-like Cells to Study Neurological Diseases. Neuron, 2017, 94:278-293.e9.
[0188] Butovsky O, Weiner H L: Microglial signatures and their role in health and disease. Nat Rev Neurosci., 2018, 19.
[0189] Cantos C, Francisco P, Trijatmiko K R, Slamet-Loedin I and Chadha-Mohanty P K: Identification of “safe harbor” loci in indica rice genome by harnessing the property of zinc-finger nucleases to induce DNA damage and repair. Frontier in Plant Science, 2014, 5: 302, pp. 1-8.
[0190] Cerbini T, Funahashi R, Luo Y, Liu C, Park K, Rao M, Malik N, Zou J: Transcription Activator-Like Effector Nuclease (TALEN)-Mediated CLYBL Targeting Enables Enhanced Transgene Expression and One-Step Generation of Dual Reporter Human Induced Pluripotent Stem Cell (iPSC) and Neural Stem Cell (NSC) Lines. Plos One, 2015.
[0191] Chung Y, Klimanskaya I, Becker S, Li T, Maserati M, Lu S, Zdravkovic T, Ilic D, Genbacev O, Fisher S, Krtolica A, and Lanza R: Human Embryonic Stem Cell Lines Generated without Embryo Destruction. 2008, Cell Stem Cell, 2(2) pp. 113-117.
[0192] Cohen D E, Melton D A: Turning straw into gold: directing cell fate for regenerative medicine. Nat Rev Genet 2011, 12:243-52.
[0193] Douvaras P, Sun B, Wang M, Kruglikov I, Lallos G, Zimmer M, Terrenoire C, Zhang B, Gandy S, Schadt E, et al.: Directed Differentiation of Human Pluripotent Stem Cells to Microglia. Stem cell reports, 2017, 8:1516-1524.
[0194] Gaj, T, Gersbach, C A, Barbas, C F: ZFN, TALEN, and CRISPR/Cas-based methods for genome engineering, Trends Biotechnol., 2013, 31(7):397-405.
[0195] Ginhoux F, Greter M, Leboeuf M, Nandi S, See P, Gokhan S, Mehler M F, Conway S J, Ng L G, Stanley E R, et al.: Fate mapping analysis reveals that adult microglia derive from primitive macrophages. Science, (80) 2010, 330:841-5.
[0196] Gomez Perdiguero E, Klapproth K, Schulz c, Busch K, Azzoni E, Crozet L, Garner H, Trouillet C, de Bruijn M F, Geissmann F, et al.: Tissueresident macrophages originate from yolk-sac-derived erythro-myeloid progenitors. Nature 2015, 518:547-51.
[0197] Haenseler W, Sansom S N, Buchrieser J, Newey S E, Moore C S, Nicholls F J, Chintawar S, Schnell C, Antel J P, Allen N D, et al.: A Highly Efficient Human Pluripotent Stem Cell Microglia Model Displays a Neuronal-Co-culture-Specific Expression Profile and inflammatory Response. Stem cell reports 2017, 8:1727-1742.
[0198] Hagan C E, Bolon B and Keene C D, Comparative Anatomy and Histology, 2012, pages 339-394.
[0199] Keren-Shaul H, Spinrad A, Weiner A, Matcovitch-Natan O, Dvir-Szternfeld R, Ulland T K, David E, Baruch K, Lara-Astaiso D, Toth B, et al.: A unique Microglia Type Associated with Restricting Development of Alzheimer's Disease. Cell, 2017, 169:1276-1290.e17.
[0200] Kettenmann H, Hanisch U-K, Noda M, Verkhralsky A: Physiology of microglia. Physiol Rev., 2011, 91:461-553.
[0201] Krasemann S, Madore C, Cialic R, Baufeld C, Calcagno N, El Fatimy R, Beckers L, O'Loughlin E, Xu Y, Fanek Z, et al.: The TREM2-APOE Pathway Drives the Transcriptional Phenotype of Dysfunctional Microglia in Neurodegenerative Diseases. Immunity, 2017, 17:566581.e9.
[0202] Ladewig J, Koch P, Brüstle O: Leveling Waddington: the emergence of direct programming and the loss of cell fate hierarchies. Nat Rev Mol Cell Biol, 2013, 14:225-36.
[0203] McGrath K E, Koniski A D, Malik J, Palis J: Circulation is established In a stepwise pattern in the mammalian embryo. Blood, 2003, 101:1669-76.
[0204] Muffat J, Li Y, Yuan B, Mitalipova M, Omer A, Corcoran S, Bakiasi c, Tsai L-H, Aubourg P, Ransohoff R M, et al.: Efficient derivation of microglia-like cells from human pluripotent stem cells. Nat Med, 2016, 22:1355-1367.
[0205] Pandya H, Shen M J, Ichikawa D M, Sedlock A B, Choi Y, Johnson K R, Kim G, Brown M A, Elkahloun A G, Maric D, et al.: Differentiation of human and murine induced pluripotent stem cells to microglia-like cells. Nat Neurosci, 2017, 20:753-759.
[0206] Pawlowski M, Ortmann D, Bertero A, Tava.es J M, Pedersen R A, Vallier L, Kotter M R N: Inducible and Deterministic Forward Programming of Human Pluripotent Stem Cells into Neurons, Skeletal Myocytes, and Oligodendrocytes. Stem cell reports, 2017, 8:80H12.
[0207] Pellenz S, Phelps M, Tang W, Hovde T B, Sinit R B, Fu W, Li H, Chen E and Monnat, Jr. R J: New human chromosomal sites with ‘safe harbor’ potential for targeted transgene insertion. Human Gene Therapy, 2019, 1-47.
[0208] Qi Hui, Zi Jin, Xiaokun Li, Changxiao Liu and Xiaojie Wang: FGF Family: From Drug Development to Clinical Application. Int. J. Mol. Sci., 2018, 19(7), 1875.
[0209] Ransohoff R M: How neuroinflammation contributes to neurodegeneration. Science, (80-) 2016, 353:777-83.
[0210] Réu P, Khosravi A, Bernard S, Mold J E, Salehpour M, Alkass K, Perl S, Tisdale J, Possnert G, Druid H, et al.: The Lifespan and Turnover of Microglia in the Human Brain. Cell Rep, 2017, 20:77V784.
[0211] Schafer D P, Stevens B: Microglia Function in Central Nervous System Development and Plasticity. Cold Spring Harb Perspect Biol, 2015, 7:a020545.
[0212] Takahashi K, Tanabe K, Ohnuki M, Narita M, Ichisaka T, Tomoda K, Yamanaka S: Induction of pluripotent stem cells from adult human fibroblasts by defined factors. Cell, 2007, 131:861-72.
[0213] Takata K, Kozaki T, Lee C Z W, Thion M S, Otsuka M, Lim S, Utami K H, Fidan K, Park D S, Malleret B, et al.: Induced-Pluripotent-Stem-Cell-Derived Primitive Macrophages Provide a Platform for Modelling Tissue-Resident Macrophage Differentiation and Function. Immunity, 2017, 47: 1 83-1 98.e6.
[0214] Thomson J A, Itskovitz-Eldor J, Shapiro S S, Waknitz M A, Swiergiel J J, Marshall V S, Jones J M: Embryonic stem cell lines derived from human blastocysts. Science, (80-) 1998, 282:1145-7.
[0215] Vlahos C J, Matter W F, Hui K Y, and Brown R F: A Specific Inhibitor of Phosphatidylinositol 3-Kinase,2-(4-Morpholinyl)-8-phenyl-4H-l-benzopyran-4-one (LY294002). The Journal of Biological Chemistry, 1994, 269(7), pp. 5241-5248.
[0216] Zhang Y, Pak C, Han Y, Ahlenius H, ZhangZ, Chanda S, Marro S, Patzke C, Acuna c, Covy J, et al.: Rapid single-step induction of functional neurons from human pluripotent stem cells. Neuron, 2013, 78:785-98.

The application's sequence listing, which the Patent Office published only in electronic form, follows.

SEQUENCE LISTING (87 sequences)

SEQ ID NO: 1 - DNA, 810 bp, Homo sapiens
atgttacaggcgtgcaaaatggaagggtttcccctcgtcccccctccatcagaagacctggtgccctatgacacggatctataccaacgccaaacgcacgagtattacccctatctcagcagtgatggggagagccatagcgaccattactgggacttccacccccaccacgtgcacagcgagttcgagagcttcgccgagaacaacttcacggagctccagagcgtgcagcccccgcagctgcagcagctctaccgccacatggagctggagcagatgcacgtcctcgatacccccatggtgccaccccatcccagtcttggccaccaggtctcctacctgccccggatgtgcctccagtacccatccctgtccccagcccagcccagctcagatgaggaggagggcgagcggcagagccccccactggaggtgtctgacggcgaggcggatggcctggagcccgggcctgggctcctgcctggggagacaggcagcaagaagaagatccgcctgtaccagttcctgttggacctgctccgcagcggcgacatgaaggacagcatctggtgggtggacaaggacaagggcaccttccagttctcgtccaagcacaaggaggcgctggcgcaccgctggggcatccagaagggcaaccgcaagaagatgacctaccagaagatggcgcgcgcgctgcgcaactacggcaagacgggcgaggtcaagaaggtgaagaagaagctcacctaccagttcagcggcgaagtgctgggccgcgggggcctggccgagcggcgccacccgccccac

SEQ ID NO: 2 - protein, 270 aa, Homo sapiens
MLQACKMEGFPLVPPPSEDLVPYDTDLYQRQTHEYYPYLSSDGESHSDHYWDFHPHHVHSEFESFAENNFTELQSVQPPQLQQLYRHMELEQMHVLDTPMVPPHPSLGHQVSYLPRMCLQYPSLSPAQPSSDEEEGERQSPPLEVSDGEADGLEPGPGLLPGETGSKKKIRLYQFLLDLLRSGDMKDSIWWVDKDKGTFQFSSKHKEALAHRWGIQKGNRKKMTYQKMARALRNYGKTGEVKKVKKKLTYQFSGEVLGRGGLAERRHPPH

SEQ ID NO: 3 - DNA, 1038 bp, Homo sapiens
atgcaacgcctggtggcctgggacccagcatgtctccccctgccgccgccgccgcctgcctttaaatccatggaagtggccaacttctactacgaggcggactgcttggctgctgcgtacggcggcaaggcggcccccgcggcgccccccgcggccagacccgggccgcgcccccccgccggcgagctgggcagcatcggcgaccacgagcgcgccatcgacttcagcccgtacctggagccgctgggcgcgccgcaggccccggcgcccgccacggccacggacaccttcgaggcggctccgcccgcgcccgcccccgcgcccgcctcctccgggcagcaccacgacttcctctccgacctcttctccgacgactacgggggcaagaactgcaagaagccggccgagtacggctacgtgagcctggggcgcctgggggccgccaagggcgcgctgcaccccggctgcttcgcgcccctgcacccaccgcccccgccgccgccgccgcccgccgagctcaaggcggagccgggcttcgagcccgcggactgcaagcggaaggaggaggccggggcgccgggcggcggcgcaggcatggcggcgggcttcccgtacgcgctgcgcgcttacctcggctaccaggcggtgccgagcggcagcagcgggagcctctccacgtcctcctcgtccagcccgcccggcacgccgagccccgctgacgccaaggcgcccccgaccgcctgctacgcgggggccgcgccggcgccctcgcaggtcaagagcaaggccaagaagaccgtggacaagcacagcgacgagtacaagatccggcgcgagcgcaacaacatcgccgtgcgcaagagccgcgacaaggccaagatgcgcaacctggagacgcagcacaaggtcctggagctcacggccgagaacgagcggctgcagaagaaggtggagcagctgtcgcgcgagctcagcaccctgcggaacttgttcaagcagctgcccgagcccctgctcgcctcctccggccactgctag

SEQ ID NO: 4 - DNA, 1440 bp, Homo sapiens
atggcttcagacagcatatttgagtcatttccttcgtacccacagtgcttcatgagagaatgcatacttggaatgaatccttctagagacgtccacgatgccagcacgagccgccgcttcacgccgccttccaccgcgctgagcccaggcaagatgagcgaggcgttgccgctgggcgccccggacgccggcgctgccctggccggcaagctgaggagcggcgaccgcagcatggtggaggtgctggccgaccacccgggcgagctggtgcgcaccgacagccccaacttcctctgctccgtgctgcctacgcactggcgctgcaacaagaccctgcccatcgctttcaaggtggtggccctaggggatgttccagatggcactctggtcactgtgatggctggcaatgatgaaaactactcggctgagctgagaaatgctaccgcagccatgaagaaccaggttgcaagatttaatgacctcaggtttgtcggtcgaagtggaagagggaaaagcttcactctgaccatcactgtcttcacaaacccaccgcaagtcgccacctaccacagagccatcaaaatcacagtggatgggccccgagaacctcgaagacatcggcagaaactagatgatcagaccaagcccgggagcttgtccttttccgagcggctcagtgaactggagcagctgcggcgcacagccatgagggtcagcccacaccacccagcccccacgcccaaccctcgtgcctccctgaaccactccactgcctttaaccctcagcctcagagtcagatgcaggatacaaggcagatccaaccatccccaccgtggtcctacgatcagtcctaccaatacctgggatccattgcctctccttctgtgcacccagcaacgcccatttcacctggacgtgccagcggcatgacaaccctctctgcagaactttccagtcgactctcaacggcacccgacctgacagcgttcagcgacccgcgccagttccccgcgctgccctccatctccgacccccgcatgcactatccaggcgccttcacctactccccgacgccggtcacctcgggcatcggcatcggcatgtcggccatgggctcggccacgcgctaccacacctacctgccgccgccctaccccggctcgtcgcaagcgcagggaggcccgttccaagccagctcgccctcctaccacctgtactacggcgcctcggccggctcctaccagttctccatggtgggcggcgagcgctcgccgccgcgcatcctgccgccctgcaccaacgcctccaccggctccgcgctgctcaaccccagcctcccgaaccagagcgacgtggtggaggccgagggcagccacagcaactccccgaccaacatggcgccctccgcgcgcctggaggaggccgtgtggaggccctac

SEQ ID NO: 5 - DNA, 1281 bp, Homo sapiens
atgtgtgaccggaatggtggtcggcggcttcgacagtggctgatcgagcagattgacagtagcatgtatccaggactgatttgggagaatgaggagaagagcatgttccggatcccttggaaacacgctggcaagcaagattataatcaggaagtggatgcctccatttttaaggcctgggcagtttttaaagggaagtttaaagaaggggacaaagctgaaccagccacttggaagacgaggttacgctgtgctttgaataagagcccagattttgaggaagtgacggaccggtcccaactggacatttccgagccatacaaagtttaccgaattgttcctgaggaagagcaaaaatgcaaactaggcgtggcaactgctggctgcgtgaatgaagttacagagatggagtgcggtcgctctgaaatcgacgagctgatcaaggagccttctgtggacgattacatggggatgatcaaaaggagcccttccccgccggaggcctgtcggagtcagctccttccagactggtgggcgcagcagcccagcacaggcgtgccgctggtgacggggtacaccacctacgacgcgcaccattcagcattctcccagatggtgatcagcttctactatgggggcaagctggtgggccaggccaccaccacctgccccgagggctgccgcctgtccctgagccagcctgggctgcccggcaccaagctgtatgggcccgagggcctggagctggtgcgcttcccgccggccgacgccatccccagcgagcgacagaggcaggtgacgcggaagctgttcgggcacctggagcgcggggtgctgctgcacagcagccggcagggcgtgttcgtcaagcggctgtgccagggccgcgtgttctgcagcggcaacgccgtggtgtgcaaaggcaggcccaacaagctggagcgtgatgaggtggtccaggtcttcgacaccagccagttcttccgagagctgcagcagttctataacagccagggccggcttcctgacggcagggtggtgctgtgctttggggaagagtttccggatatggcccccttgcgctccaaactcattctcgtgcagattgagcagctgtatgtccggcaactggcagaagaggctgggaagagctgtggagccggctctgtgatgcaggcccccgaggagccgccgccagaccaggtcttccggatgtttccagatatttgtgcctcacaccagagatcatttttcagagaaaaccaacagatcaccgtctaa

SEQ ID NO: 6 - DNA, 3975 bp, Homo sapiens
atgtcgcggaggaagcaagcgaagcctcaacatttccaatccgaccccgaagtggcctcgctcccccggcgagatggagacacagaaaagggtcaaccgagtcgccctactaagagcaaggatgcccacgtctgtggccggtgctgtgccgagttctttgaattatcagatcttctgctccacaagaagaactgtactaaaaatcaattagttttaatcgtaaatgaaaatccagcctccccacccgaaaccttctcccccagcccccctcctgataatcctgatgaacaaatgaatgacacagttaacaaaacagatcaagtggactgcagcgacctttcagaacacaacggacttgacagggaagagtccatggaggtggaggccccggttgctaacaaaagcggcagcggcacttccagcggcagccacagcagtaccgccccaagcagcagcagcagcagcagcagcagcagcggcggcggcggcagctcctccacaggtacctcagcgatcacaacctctctacctcaactcggggacctgacaacactgggcaacttctccgtaatcaacagcaacgtcatcatcgagaacctccagagcaccaaggtggcggtggcccagttctcccaggaagcgaggtgcggcggggcctctgggggcaagctggccgtcccagccctcatggaacaactcctagctctgcagcagcagcagatccaccagctgcaattgatcgaacagattcgtcaccaaatattgctgttggcttctcagaatgcagacttgccaacatcttctagtccttctcaaggtactttacgaacatctgccaaccccttgtccacgctaagttcccatttatctcagcagctggcagcagcagctggattggcacagagcctcgccagccaatctgccagcattagtggtgtgaaacagctacccccaatccagctacctcagagcagttctggcaacaccatcattccatccaacagcggctcttctcccaatatgaacatattggcagcggcagttaccaccccgtcctctgaaaaagtggcttcaagtgctggggcctcccatgtcagcaacccagcggtctcatcatcgtcctcaccagcttttgcaataagcagtttattaagtcctgcgtctaatccacttctacctcagcaagcctccgctaactcggttttccccagccctttgcccaacatcggaacaactgcagaggatttaaactccttgtctgccttggcccagcaaagaaaaagcaagccaccaaatgtcactgcctttgaagcgaaaagtacttccgatgaggcattcttcaaacacaagtgcaggttctgcgcgaaggtctttgggagtgacagtgccttgcagatccacttgcgttcccataccggagagaggccattcaagtgcaacatctgcgggaacaggttctccaccaaggggaatctgaaagtccactttcagcgccacaaagagaaataccctcatatccagatgaacccctatcctgtgcctgagcatttggacaatatccccacgagtactggcatcccatatggcatgtccatccctccagagaagccagtcaccagctggctagacaccaaaccagtcctgcctactctgaccacttcagtcggcctgccgttgcccccaaccctcccaagcctcatacccttcatcaagacggaagagccagcccccatccccatcagccattctgccaccagccccccaggctcagtcaaaagtgactccgggggccctgagtcagccacaagaaacctaggtgggctcccagaggaagccgaagggtccactctgccaccctctggtggcaaaagcgaagagagtggcatggtcaccaactcagtcccgacggcgagcagtagcgtcctgagctccccagcggcagactgcggccccgcgggcagtgccaccaccttcaccaaccctttgttgccgctcatgtccgagcagttcaaggccaagtttccttttgggggactcctggactcagctcaggcatcagagacgtccaagcttcagcaactggtagaaaacattgacaagaaggccactgaccccaatgagtgcatcatctgccaccgggttctcagctgccagagcgccttgaaaatgcactacaggacacacactggggagaggccctttaagtgtaagatctgtggccgggctttcaccacgaaagggaatcttaaaacccactacagtgtccatcgtgctatgcccccgctcagagtccagcattcctgccccatctgccagaagaagttcacgaacgctgtggtcctgcagcagcacatccgaatgcatatgggaggccagatccccaacaccccagtccccgacagctactctgagtccatggagtctgacacaggttcctttgatgagaaaaattttgatgacctagacaacttctctgatgaaaacatggaagactgtcctgagggcagcatccctgatacacctaagtctgcagacgcctcccaagacagcttatcctcttcgcctttgcccctcgagatgtcgagcatcgctgctttggaaaatcagatgaagatgatcaatgctggcctggcagagcagctacaggccagcctgaagtcagtggagaatgggtccatcgagggggatgtcctgaccaatgattcatcctcagtgggtggtgacatggaaagccaaagtgctggcagcccagccatctcagagtctacctcttccatgcaggctctgtccccgtccaacagcacgcaggagttccacaagtcacccagcattgaggagaaaccacagagagcggtcccaagcgagtttgccaatggtttgtctcccaccccagtgaatggtggggctttggatttgacatctagtcacgcagagaaaatcatcaaagaagattctttggggatcctcttcccttttagagaccggggtaaatttaaaaacactgcttgtgacatttgtggcaaaacatttgcttgtcagagtgccttggacattcactatagaagtcataccaaagagagaccatttatttgcacagtttgcaatcgtggcttttccacaaagggtaatttgaagcagcacatgttgacacatcagatgcgagatctgccatcccagctctttgagcccagttccaaccttggccccaatcagaactcagcggtgattcccgccaactcgttgtcatctctcatcaagacagaggtcaacggcttcgtgcatgtttctcctcaggacagtaaggacacccccaccagtcacgtcccgtctgggcctctgtcttcctctgccacatccccagttctgctccctgctctgcccaggagaactcccaagcagcactactgcaacacatgtggcaaaaccttctcctcatcgagtgccctgcagattcacgagagaactcacactggagagaaaccctttgcttgcactatttgtggaagagctttcacgactaaaggcaatcttaaggtacacatgggcactcacatgtggaatagcacccctgcacgacggggtcggcggctctctgtggatggccccatgacatttctaggaggcaatcccgtcaagttcccagaaatgttccagaaggatttggcggcaagatcaggaagtggggatccttccagcttctggaatcagtatgcagcagcgctctccaacgggctggcgatgaaggccaacgagatctccgtcattcagaacggtggcatccctccaattcctggaagcctcggcagtgggaacagctcacctgttagtgggctgacgggaaacctggagaggctccagaactcagagcccaatgctcccctggccggcctggagaaaatggcaagcagtgagaacggaaccaacttccgcttcacccgcttcgtggaggacagcaaggagatcgtcacgagttaa

SEQ ID NO: 7 - protein, 116 aa, Homo sapiens [sequence omitted]

SEQ ID NO: 8 - protein, 106 aa, Homo sapiens
KKNKNCRRHSLYVDFSDVGWNDWIVAPPGYQAFYCHGDCPFPLADHLNSTNHAIVQTLVNSVNSSIPKACCVPTELSAISMLYLDEYDKVVLKNYQEMVVEGCGCR

SEQ ID NO: 9 - protein, 146 aa, Homo sapiens
PALPEDGGSGAFPPGHFKDPKRLYCKNGGFFLRIHPDGRVDGVREKSDPHIKLQLQAEERGVVSIKGVCANRYLAMKEDGRLLASKCVTDECFFFERLESNNYNTYRSRKYTSWYVALKRTGQYKLGSKTGPGQKAILFLPMSAKS

SEQ ID NO: 10 - protein, 121 aa, Homo sapiens
APMAEGGGQNHHEVVKFMDVYQRSYCHPIETLVDIFQEYPDEIEYIFKPSCVPLMRCGGCCNDEGLECVPTEESNITMQIMRIKPHQGQHIGEMSFLQHNKCECRPKKDRARQENCDKPRR

SEQ ID NO: 11 - protein, 165 aa, Homo sapiens
MEGICRNRVTNNVKDVTKLVANLPKDYMITLKYVPGMDVLPSHCWISEMVVQLSDSLTDLLDKFSNISEGLSNYSIIDKLVNIVDDLVECVKENSSKDLKKSFKSPEPRLFTPEEFFRIFNRSIDAFKDFVVASETSDCVVSSTLSPEKDSRVSVTKPFMLPPVA

SEQ ID NO: 12 - protein, 133 aa, Homo sapiens
APMTQTTSLKTSWVNCSNMIDEIITHLKQPPLPLLDFNNLNGEDQDILMENNLRRPNLEAFNRAVKSLQNASAIESILKNLLPCLPLATAAPTRHPIHIKDGDWNEFRRKLTFYLKTLENAQAQQTTLSLAIF

SEQ ID NO: 13 - protein, 184 aa, Homo sapiens
PVPPGEDSKDVAAPHRQPLTSSERIDKQIRYILDGISALRKETCNKSNMCESSKEALAENNLNLPKMAEKDGCFQSGFNEETCLVKIITGLLEFEVYLEYLQNRFESSEEQARAVQMSTKVLIQFLQKKAKNLDAITTPDPTTNASLLTKLQAQNQWLQDMTTHLILRSFKEFLQSSLRALRQM

SEQ ID NO: 14 - protein, 159 aa, Homo sapiens
MEEVSEYCSHMIGSGHLQSLQRLIDSQMETSCQITFEFVDQEQLKDPVCYLKKAFLLVQDIMEDTMRFRDNTPNAIAIVQLQELSLRLKSCFTKDYEEHDKACVRTFYETPLQLLEKVKNVFNETKNLLDKDWNIFSKNCNNSFAECSSQGHERQSEGS

SEQ ID NO: 15 - protein, 230 aa, Homo sapiens
NEPLEMWPLTQNEECTVTGFLRDKLQYRSRLQYMKHYFPINYKISVPYEGVFRIANVTRLQRAQVSERELRYLWVLVSLSATESVQDVLLEGHPSWKYLQEVETLLLNVQQGLTDVEVSPKVESVLSLLNAPGPNLKLVRPKALLDNCFRVMELLYCSCCKQSSVLNWQDCEVPSPQSCSPEPSLQYAATQLYPPPPWSPSSPPHSTGSVRPVRAQGEGLLPHHHHHHHH

SEQ ID NO: 16 - protein, 128 aa, Homo sapiens
MAPARSPSPSTQPWEHVNAIQEARRLLNLSRDTAAEMNETVEVISEMFDLQEPTCLQTRLELYKQGLRGSLTKLKGPLTMMASHYKQHCPPTPETSCATQIITFESFKENLKDFLLVIPFDCWEPVQE

SEQ ID NO: 17 - protein, 210 aa, Homo sapiens
QVQVVTQDEREQLYTPASLKCSLQNAQEALIVTWQKKKAVSPENMVTFSENHGVVIQPAYKDKINITQLGLQNSTITFWNITLEDEGCYMCLFNTFGFGKISGTACLTVYVQPIVSLHYKFSEDHLNITCSATARPAPMVFWKVPRSGIENSTVTLSHPNGTTSVTSILHIKDPKNQVGKEVICQVLHLGTVTDFKQTVNKGVDHHHHHH

SEQ ID NO: 18 - protein, 76 aa, Homo sapiens
QHHGVTKCNITCSKMTSKIPVALLIHYQQNQASCGKRAIILETRQHRLFCADPKEQWVKDAMQHLDRQAAALTRNG

SEQ ID NO: 19 - protein, 112 aa, Homo sapiens
ALDTNYCFSSTEKNCCVRQLYIDFRKDLGWKWIHEPKGYHANFCLGPCPYIWSLDTQYSKVLALYNQHNPGASAAPCCVPQALEPLPIVYYVGRKPKVEQLSNMIVRSCKCS

SEQ ID NO: 20 - DNA, 747 bp, Homo sapiens
atgtctagactggacaagagcaaagtcataaactctgctctggaattactcaatggagtcggtatcgaaggcctgacgacaaggaaactcgctcaaaagctgggagttgagcagcctaccctgtactggcacgtgaagaacaagcgggccctgctcgatgccctgccaatcgagatgctggacaggcatcatacccactcctgccccctggaaggcgagtcatggcaagactttctgcggaacaacgccaagtcataccgctgtgctctcctctcacatcgcgacggggctaaagtgcatctcggcacccgcccaacagagaaacagtacgaaaccctggaaaatcagctcgcgttcctgtgtcagcaaggcttctccctggagaacgcactgtacgctctgtccgccgtgggccactttacactgggctgcgtattggaggaacaggagcatcaagtagcaaaagaggaaagagagacacctaccaccgattctatgcccccacttctgaaacaagcaattgagctgttcgaccggcagggagccgaacctgccttccttttcggcctggaactaatcatatgtggcctggagaaacagctaaagtgcgaaagcggcgggccgaccgacgcccttgacgattttgacttagacatgctcccagccgatgcccttgacgactttgaccttgatatgctgcctgctgacgctcttgacgattttgaccttgacatgctccccgggtaa

SEQ ID NO: 21 - DNA, 350 bp, Homo sapiens
gagtttactccctatcagtgatagagaacgtatgaagagtttactccctatcagtgatagagaacgtatgcagactttactccctatcagtgatagagaacgtataaggagtttactccctatcagtgatagagaacgtatgaccagtttactccctatcagtgatagagaacgtatctacagtttactccctatcagtgatagagaacgtatatccagtttactccctatcagtgatagagaacgtatgtcgaggtaggcgtgtacggtgggcgcctataaaagcagagctcgtttagtgaaccgtcagatcgcctggagcaattccacaacacttttgtcttatactt

SEQ ID NO: 22 - DNA, 1797 bp, Homo sapiens
gctcgaaaccggacggagccattgctctcgcagagggaggagcgcttccggctagcctcttgtcgccgattggccgtttctcctcccgccgtgtgtgaaaacacaaatggcgtattctggttggagtaaagctcctgtcagttacgccgtcgggagtacgcagccgcttagcgactctcgcgttgccccctgggtggggcgggtaggtaggtggggtgtagagatgctgggtgtgcgggcgcggccggcctcctgcggcgggaggggagggtcagtgaaatcggctctggcgcgggcgtcctcccaccctccccttccttcgggggagtcggtttacccgccgcctgcttgtcttcgacacctgattggctgtcgaagctgtgggaccgggcccttgctactggctcgagtctcacatgagcgaaaccactgcgcggggcgcgggggtggcggggaggcgggcgttggtacggtcctccccgaggccgagcgccgcagtgtctggccccgcgcccctgcgcaacgtggcaggaagcgcgcgctggaggcgggggcgggctgccggccgagacttctggatggcggcggccgcggctccgccccgggttcccaccgcctgaagggcgagacaagcccgacctgctacaggcactcgtgggggtgggggaggagcgggggtcggtccggctggtttgtgggtgggaggcgcttgttctccaaaaaccggcgcgagctgcaatcctgagggagctgcggtggaggaggtggagagaaggccgcacccttctgggcagggggaggggagtgccgcaatacctttatgggagttctctgctgcctcccgtcttgtaaggaccgccctgggcctggaagaagccctccctcctttcctcctcgcgtgatctcgtcatcgcctccatgtcgagtcgcttctcgattatgggcgggattcttttgcctaggcttaaggggctaacttggtccctgggcgttgccctgcaggggagtgagcagctgtaagatttgaggggcgactccgattagtttatcttcccacggactagagttggtgtcgaggttattgtaataagggtggggtagggaaatggagcttagtcattcacctggggctgattttatgcaacgagactgcggattatcactacttatcatttttggagcatttttctagagacagacataaagcatgatcacctgagttttataccatttgagacccttgctgcaccaccaaagtgtagcatcaggttaaatcttaatagaaaaattttagcttttgcttgagaaaccagtgcttccctccctcaccctctctccccaggctctctacccctttgcatccctaccaggcatcttagcaactctcactcatacttgatcccattttccatttgttgtacttgctcctctagtattcagacatagcactagctttctccctctcttgatcttgggtagcctggtgtctcgcgaaaccagacagattggttccaccacaaattaaggcttgagctggggcttgactcttacccagcagtgcttttattcctccctagttcacgttcttaaatgtttatcttgattttcattttatcctttttccttagctgggattctgtccctgaccgtcttcacagtccaggtgatcttgactactgctttacagagaattggatctgaggttaggcaacatctccctttttcttcctctaaatacctctcatttctgttcttaccagttagtaactgatctcagatgcctgtgtgatagcttcc

SEQ ID NO: 23 - DNA, 1642 bp, Homo sapiens
tgctttctctgacctgcattctctcccctgggcctgtgccgctttctgtctgcagcttgtggcctgggtcacctctacggctggcccagatccttccctgccgcctccttcaggttccgtcttcctccactccctcttccccttgctctctgctgtgttgctgcccaaggatgctctttccggagcacttccttctcggcgctgcaccacgtgatgtcctctgagcggatcctccccgtgtctgggtcctctccgggcatctctcctccctcacccaaccccatgccgtcttcactcgctgggttcccttttccttctccttctggggcctgtgccatctctcgtttcttaggatggccttctccgacggatgtctcccttgcgtcccgcctccccttcttgtaggcctgcatcatcaccgtttttctggacaaccccaaagtaccccgtctccctggctttagccacctctccatcctcttgctttctttgcctggacaccccgttctcctgtggattcgggtcacctctcactcctttcatttgggcagctcccctaccccccttacctctctagtctgtgctagctcttccagccccctgtcatggcatcttccaggggtccgagagctcagctagtcttcttcctccaacccgggcccctatgtccacttcaggacagcatgtttgctgcctccagggatcctgtgtccccgagctgggaccaccttatattcccagggccggttaatgtggctctggttctgggtacttttatctgtcccctccaccccacagtggggccactagggacaggattggtgacagaaaagccccatccttaggcctcctccttcctagtctcctgatattgggtctaacccccacctcctgttaggcagattccttatctggtgacacacccccatttcctggagccatctctctccttgccagaacctctaaggtttgcttacgatggagccagagaggatcctgggagggagagcttggcagggggtgggagggaagggggggatgcgtgacctgcccggttctcagtggccaccctgcgctaccctctcccagaacctgagctgctctgacgcggccgtctggtgcgtttcactgatcctggtgctgcagcttccttacacttcccaagaggagaagcagtttggaaaaacaaaatcagaataagttggtcctgagttctaactttggctcttcacctttctagtccccaatttatattgttcctccgtgcgtcagttttacctgtgagataaggccagtagccagccccgtcctggcagggctgtggtgaggaggggggtgtccgtgtggaaaactccctttgtgagaatggtgcgtcctaggtgttcaccaggtcgtggccgcctctactccctttctctttctccatccttctttccttaaagagtccccagtgctatctgggacatattcctccgcccagagcagggtcccgcttccctaaggccctgctctgggcttctgggtttgagtccttggcaagcccaggagaggcgctcaggcttccctgtcccccttcctcgtccaccatctcatgcccctggctctcctgccccttccctacaggggttcctggctctgctct

SEQ ID NO: 24 - DNA, 291666 bp, Homo sapiens
ctcggcgttctcaccgctgcagaacggctgcagggggcagagtaaagagctgctgtcagtttccctgcccagagagtgccaacagctgctctgacctattgcaggcatgtgtgttccaggatgcagccttcctgcactttgaccactctagattaattgctaaccaagatatgcacatgatggggctcacaaagtattaggcggtattttaacaacaaaagctgcgaagaaatccctagaaatgttggctcttctggctgggaaaacgcagtctgtcaacagttgcctcaaaaactcagaagctcagagagttggattcggtcaccagagaggcccctcaaagaggccccaaccattcagatcctctgctctgtcccccatgacagcggggacgaaggtcctaagccctggccgggagggcagttgacctcgggactcgccgcggggcggagcgggtgctgggaggaaggagggcgtggctggcggggtgtggctggcgggacggggcggggcgaagacagagcgaggcggggcctgggacggggggggggtcggtgtcgccgtgggggcgtggaatgtggggtgggcgtggctaaaggcaaagggcggggcgcgcgcgtcgggaagatggcgctacgtctgctgcggagggcggcgcgcggagctgcggcggcggcgctgctgaggctgtgagtgcaggtccccgttccccgccttcccggcccggctcgccgcgggtcggctcctgttgcagccccgcgggccgggcgcggcctccccaagccctcacgggaacccagccggacggaagcaccatgcgcctcccacgcgctggctcgacctcgtccaaggtcgctgccgcccgcgcctccctttgggagggccctcgttgcacccggaaaatgggtacacaccttaggtcgaattacctggactcagccccaggaaacaaaactgcctgcctcccccaaatggcaaacgtgaacgcgccagtctttgagaggcggcttgcctggtgaagaacacctgcggttcgtttaacacagcggttcccaaacggtttggtctcaggacccgtttacacgtctaaaaataatttgaggaccccccaaagcttttgcttatatctattgatttttgtgcatgaggaattaaaccagaaatttaaaaaatattcacttaataacaaacccattaacttttaatacaaataacactttaatgcataacttctcaaaaaaaaagtgagaagattggctcatggtttttatatttttgaaaatttctttggtttaataaaggacagctggagtctcatatcagctgttttgaaggaaatatttgaaagaaattctgggctcatgcagatgcagatattagttgggaaagggaggaccaagcagaccctctcaacgggtctcagggaccccctcaggtgtctttggaccacactttgagaaccgctggtctagcacttgcccatcgcctaggtacgtgcacatacatggtctcatttggttcccttgaccaccatgtgaagaagttgggtgtcatgtttataaagatgaaaaaacagggtcagaaaggttaaggattctcaaagccctatgaccagtaatgagagagtttggttcaaacactaagtgtatggctcctggtctggaacttctttatttatttatttttattttttgagacagagtctcggtctgtcacctaggctgtagtacagtggtgtaatctcggcttactgcaacctccacctcctgggttcaagcgattctcatgcctcagcctcctgagtggctggcattacaggtgtgcaccaccacccctggctaatttttgtatttttagtagagacagagtttcgccatgttggccaggctgttctcgaactcctgacctcaagggggtccacccggatcagcctcccaaagtgctgggattacaggcgtgagccaccatggccggcctggtggtctggaacttctttttttttttttttttttttttttccgagatggagtttcgcttttgtcgcccaggctggagtgcaatggcgccatctcagctgactgcaacctccgcctcccggattcaagtgattctcctgccgcagcctccggagtagttgggattacagggcgtccgccaccatgcccggctaatttttgtatttttaatagagacgaggtttcaccatgttggccaggctggtctggagctcctgacctcgggtgatccacctgcctcggcctcccaaagtgttgggattaaaggcgtgagccaccgtgcccggcctgggtctgaacttcttacgtcttcttgcactgtgactcttcagtcacccatgtcctatgggaggacccacctagtcttatgcatcccactttcccatttcctccgctgcccctggcacaggggagtcacccctcgccctagaggagcagctcaggcagtgtatccaggctggtccagaagggtccttttctggcgccttttgagggggccagcgtctgtgacctgttcagtagcgggtccagtgagcgcacacagtccccacgccagtacgctgggggttaactcagtgctcctcacccgccttagcacactggtctgttctcgacatgtctacccgctgaatataggattcttgattggcattttttttcctttgagcattttaaagcgtattatcgcactgtctttttgcctccattattctaatgagaattcagacgttaatgttattagggttctatgtaagtgatgagtctttttttttttttttttttttttttttttgcttgattttctctttgtcttggtctttcggtggttttattatgatgtgtgtagatctgtttgagtttatcctcttggaagtttattgagtttcttggatgtgtatacatcaaatttgggaagtttttggctattgttctctcaaaaaagtctactctcttatctctctcttctctttcggaggctcccattgcgtatatgttggtgtagttgatggaaccccacaggtctttgagactgttccattttctttctgttcctcaggctggacaatgtcaattgacctgtctttgttttttttttttttttttttttttttgagacagagtcttgctctgtcaccaggctggagttcagtggcgcaatttctgcccactgcaacctctgactcccgggttcaagcgattctcctgctccagcttcccgagtagttgggattacaggcacgcgccaccacgtccagctaatttttgtatttttagtagagacggggtttcaccatgttggccaggatggtctcgatcttctgacctcgtgatccacctgccttggcctcccaaagtgctgggattacaggtgtgagccaccgtgcccagccgacctgtttttaggtttgctgattgctccgtcttccaactcaaatcattttcattttaatccagaacttctttctttttggagaatgagtctcactctgtcacccaggctggagtgcagtggtgcaatctgggctcactacaacctctgcctcctgggctcaagctgtcctcccacctcagcctcccaaatagctgggactacaggtgtgcaccactgcacctggctaattgtttctattcttttgtagaaatcaggtttcgccatgttgctcaggctggtctcgaacttggctcaagcaatctgcctgcctctgtcgctcatagtattgggattacaggcatgagccatcatgcccggcccttttctatactttctatctcttcattgatattctctatgtactgaaacatcgttctcatactttcctttagttctttttttctttctttctcttagagacggagtctccaggctggagtgcagtggtgagatcgtagctcactgcagcctgcagctcctgggctcaagtgatcctcctgcctcagcctccccagtagctgggactacaggcacacaccactatgcccagctaatttttaaattttttgaagagacagagtcttgcagtgttgccaagggtggtcttgaactgctgggttcaaatgattttcttgccttggcctccaaagcagtggaattctaggcatgaacgactgcacctggactccttcagttctttatgcatagtttcctttcgttttttgaacatactttaaatagatgatttaattagtaagtccaacatctggacttcctcagggacagtttgtactgactacttttttcctgtgtgtataggtcatactttcttttcgttgcatgtcttgtatatttttttgaaaactggacattttaagtaatataatggggcaactctggaaatcagatttctcccttttgccagggtttattgttgttgttgtttgcttagtgactttaataaactaattctgcattgtattctttgtcatgtgcaaccagcgaggtctctgcttggttagcttagtagtctaacaattagacaaaggtttccttaaattcctggaaccagtaagtctcctagtctttgctgagggactctgtgtgtgtcaggacatgtcttcaacattcagccacagtttgtcctgcttccacagagactgaaggttagctagacatgagcacttaaggtctttccttagccggtatacagccctgcacatgtgcgtggcctcctagagtctcaggaacatgtcacaacttttcagagctctctatgggtatcttgttctccatttttgccttttaagtgttttggttagcctgttgtttaccctgttatcttccatctcaagtagctgtgatggtaaataagtacttctgattgtttggacaaatgccctccgggaaaatactgttcccactgtgcaagctctgagtcaggtcaattaaagacagttttacaagtagggtcttccaaggaaccacaagacaggtcaaatagtgacattttccagaaatggggctttccccctctagtggctgccatgctgctggttttcactgtgatgggggctattgattttcaagtctaccacagagctggggaagagggatagggtaaactaaacccccacgacaattgctgttcttactgagattcatacatttttcttgaataaatgatccctatattgctgcaagtctttaatttctagaattctgaaaaagtttattctgacaatttttgccaatattcttgttgattttatggaggataggattttcaaaggtcctttttctgtagtttttgctgaagtcagcctgcatagagttttgatcgagtggatttgaatttataaatttttttttgcatctgttgtgttgatcataaggcttttcttcttcagtgtgttaatacggtaaattacagtgattgactttttaaaagttaagctgaccattgcattcctggaataaaccccactgattgtgatgtattgtttggattgcatgtgctaaaattttgttaaaattatttgtatctgtgttcataaggaataatcgcctatagttttctgatattgccttggtctgggtttggtattaggatggtgatggtcacataggatgtgttggagagttcccgcttctatttcatgaaacaatttgtgtaaatttggtaagattttgcctgtaaatgtttgcacctgcagttttctttgtggaaaaagtgttaaactacaaatttagtttctttaatagacatattgccattcagattatctagttcttcttgagtaagctttggtagtttgtatctttgaaggactatgtccatttcatctaagttgtcacattcacgtgcctggagttgttcatgctgactccttatcctttttcttacagctctacaaaggtatataccacacaattcaccctttgtaagtgtgtgattaaataatttctagtaagtttataggcccatcactacagtccaatgttaggcccccctccaaatttctatcatcccgcaaattctcttgagcccatttgcagttaatccttacccctgcctctagtctgtcatctccttactgtttgtgtcatccatagtgatgtgtccttcttcatccttgatatttgtaattcttttttctctgttttttattttatcacctggcttgagttattttgctctttttaaagaaccatctttttgttttatcgatttttctcttttttttgttttctatttcattgatttctgtctcatctttattatttcctaccttcaccttactttgggtttaatttaccctttacctttttaaggtggaaatttagataattaattttagacctttctactttttttttttttttttttgagacaaggtcttgctctgtcacccaggctggagtgcactgatgcaatcttggctcactgcaacctccacattctaagctcaaacagtcctcctgcctcagcctcccaagtagctgagactacaggcattagccaccatgtctggctaatttttgtattttttggagagacggggtttcgccatgttgcccaggcttgtctcaaactcctggattcaagcagtctacccaccttggcctccgaaagtgctgggattatggatgtgagccgccacacccatccggggtctactttctaaatataagcactcagtaattactttacagccatgcttggtggctcatgtctataatcccagcactttgaaaggctgaggtgggaggatcacttgtggccaggagttcaagtccagattgggtaacatagtgagatgctgtcactacaaaaaaaattttaaaagttagctggatgtggtggctcatgcctgtgatcctagccacttgggatgctgaggtgggaggattccttgagcctggggatttggggtttcagtgagctgtgatgataccactgcactccagcctgggtgacagagcaaagctctattaaaaatagtgatgataataataataataataataataataataataataataacaaaattccctctaaggattgttttaattccctctagcaaattttgcaagatttctgatacctgtaatctcttttcatttcttatgttgatactctgtttctgttttctaaagtattcatagtaagactccaaaagaaaaagggctccctggctgtatgtgttcagtggtagcagccaaggaatgtgccaggaaggtacttcacattttgcagtgccgtggtggagaggaatctggtaaagaaaaaaccagatgaagacagtttagagaggcgacaactacaagctaagtacctgagattctgggtcaacaggaaggggacagtgtgtgaggaagcagcagggccatggaaggtggctgaggggcctggatggggttacctgtcagggtcccaataggccttttgtagggttggcttcatctttgaagcctcctgaggttaccgtgacaaccactactgtccctctgtactgctgtgaggccactaagggaaaaagggagggaagggacccaaagggaggacagaggtgggagaagagggagcgatggggagagaaaggcagagaacaatggaagcagtgagcgagaaaggggagaaacctcactgaaaaggaggcagggtaaacatgactgagatggaaaaatgatcacattaaaaagaactcactcagagtaaggatgaatgtgtgttctttgctacttgaactggtattaaaaggccaatgtgaagtgttagatattttaaaatgtttattggtatcattagaagttgacttcagttgcccaaatgcatggtgagaaaggggatgtgtaaacaaaaatgatattttggattgtgaggcagaaagtcattttaaatggccctgggaggcagagggcccaatcctctcagtcgcctgggactgtcctgggtttagcatggaatgccttatgttcccagaaaccccttaggtcccagcaaaccaggatggccattcaccatagaggtggagaagtaaagggctgtggatgaagacgggtacttattaggaacagggaggaggatggagttggaggggatgagtgcagggcaggatacagagcccagaaggaaaggaattgacagaagctgggagaaagaataaaaagaccagtggtccaagatggtagaccacaggttcaagaactggagcaagagtcttctggaatggcctccattctagaaccgagagagagtattcagaatgctttaatggagtaagaagggccactgcttagagtggggctgaagagaaaagaaagaaggagaccctgcggaagcggcaataccaggaaggcagttgtatgcacatcatgcagaccaggagtagcctaggggtaggggacatgcctgggctggacagtggaatttgtgggaaatcagatttccctgagcaaaaaccagtgggcagcagccaaactggtgagcaagaactggctgtggtggctgggcccgaattgggagctacacctgcccgggcaggtgtagctgcgagggaggtctctgccaacaactcagctgtgccgtgcctgctgaacggcctcaccttggcctctggctctgttgcagctgtgtggggctcgtgctcctacataccgttatcctgtggtagagttttaccgtggaccagagccatctagaggacattgagttacccacatactttctgtgggagaggccaaggagtcagggggggaggccgggacctgaagatcaactctttactgcagagatccctccctccctctctctgtcccatggatccagagggaagttgaggacagtttcatgccacatgcttgacccgactcaactgagtaactgtggccactgagaagactctgtccttgcaaataactctccttagtgcccatattctgcagaatgtttgagtggcacgagtacttcattcgtctagaaatatttcatggtagtcagttgctaataacaggatatctgcaggtagtgtgttctcaggaggcacacctgaagcctcaaaggtgaggacatagacatggctgtgggtgagcctgtgccaagacatgacccatatccatggggagtgctctcagggcagctgacactgctcagcctcagcagtctccagtgatagcttcggaacagccacggtctgactgatatactttctgaaaacagcctttggtcacacagtttcctaactaaatgtggtggtggccactagaagttgccattttatgcgggactccctgtgaggaagcccatagtgctggtagctgaaatttaggaatgcaggtttctaagaaggctcggaaaagcaagctgggctccttggggaggagctattagtacgtttaattaaattttttaacatataaaaagttgttaattataaaaacaacatttttttctaccctgagtgcagctggagctgtgttctgccgttacacaattcctcattaattccacacattgcttacgatcctgtgaagtttagaattttattaggcaataaataagaaatcaaggaaataatatttgtggtttcatatcggtcacttgggtatgaatttaaatccactgtaattcaaacaggtttagtttatttcatgttgctacttgaatgtgttatagcgtatcaattaaataactcacttgaatgatgcagacttgagattcattccctccttctttccttccttcctttctcaccccatcctccctaccataaaccaggtttagaatagctgttaatttagctgctttgattttttgttgttgtttattttgaaacggagtctcactctgtcgctcaggctggagtgcagtggcacaatctcagctcactgcaacctctgcctcctgggttcaagcgatcctcctgcctcagcctcctgagtagctggaattacaggtgcacaccaccacgcacagctaatttttttatttttattttttatttttagtagagatggggtttcaccatgttggtcaggctggtcttgaactcctggcctcgtgatctgcctgccttggtctcctgaagtgctgggattataggtgtgagccaccacgcctggcttttttttttttttttttttttttaagactggtgaagctatgttgcccagactggactgcagtggctattcgcaggtgttatcatagcttactgcagccttgacatcctgggcaccagtagcgcttcttcctcagtctctagtagctgggactgcaggcatgtgctaccacacccagctgattttatgttttgtttacatttaacgatgttaatctaggagcagtgatgatgttcactgttgttccacatgactctagcacatatatatttgtatgtgtataaccacagttgttcatttagtctgtttccaggttttcatttagtctgttccaggttcatttagtctgtttccagacctaaaaaggcctgttggctaccgcgacagccttggctgtcacactgggcccgcccatgggtgtttctgtaagtggccatgaacctcttctgaactacaccacatgttaacatccttctcttagttaggtctttgagattggcagaggtgctctatttaataataaaggaatgggctgggcattggtggctcacacctgtaattccagcactttgagaggctgaagtggaccgatcacttgaggtcagaagttcaagaccagcctggccagcatggtgaaaccccgtctctactaaaaatacaaaaattagcctggtgtggttgcgcatgcctgtagtcccagctactcaggagactgaggcaggagaattgcttgaacccaggaggtggaggttgcagtgagccaagatcatgccactgcactccagcctgggtgacagagcgcgactccgtctcaataataataataatagtaataataataatataataaaggaatgaaagtttccttagaaagtaaggtttctattttaatagaatacttgagtgagcaagtctgtcttaactgtttctcctcactgtgtctaaatgagaaggaagaatgaccctggtgtctgtatttgcaggacacttttcagtattaatattcagaaccccaaatattgaaaagtgtaaaaggcagtacttgctacttcattgtcccgttgctagccccagtaaaatgagggtcttagtttagcggaagactgtgtttactgtttaactcacagttcacgctaaaaattggcacttttttttttcctaataagggcctctctatggacctttttaaagtttatatggtcattaaaaacatcattgcacacatatactttgtaccactttggaagtagtgcaggcttgtttgaaagcatacacttgacttgtcttcttacttagtctcacagtattctttgtgagaaggttgatatgcccacattattctgtggccaaaaacaaaagtttaggaaatgaaaacagcaaacagaaaaccccatgccaagtgctgttttcgtagtgaggcactggagggcgctccgctctagcaatgggagatgcacgcagtctctgcagtctgcaggctgccctcacgaacgcctttcagaagatgtaagagttttttctgttcattttaaggcaaatgaaagacacatggatggtagaggaaatatttctatactgacctataaacggtccctttaaaagtttatgagaaactgaagaagtagctctgtgctccagccctccttatgacctcctctctccctagcctgttgcagcctcaccggcctcctcttctgggctgtgtcgtcagcctgaagccctctgtccctttgtgcctcagctcaaatgtcacaaatcagagaggtcttccttgaccaccctgtacaacatagcctccaccccgctaagcagcctctgcactaccctgtccccttactgctgttttcattttttcctattgccccatttccaccagacatatcacatgcttatttgtttattgtccgcctgtatcctaccccagcccccagatattcatgagagcagggacttggtttattccattgctactatatatccagaacctaaaacaatccttggcagtgcctgatataaatttgcagaaggaaaaaagaacagatttaggaatgaaatattttgagtgtttctaaagatttagtggattttttttctttattttggtaaattatacataacaaaattatcattttaacttttttttttttgaggtggagtctagctctgcccccaggctggagtgcagtggtgcgatctcactcactgcaacctctgcctcctgggttcaagcaactctcctgcctctgcctccgagtagctgggattacaggtgcccgccaccacgcctggctaattttttgtatttttagtagagacggggtttcaccatgttggccaggctggtctcgaactcctgacctcaggtgatctacccgcctcggcctcccaaagtgctgggattacaggcgtgagccaccatggccggcccattttaaccatctttaagtgtacagtttagtggcattaagtacattcacattgttgtacaactgtcaccaccatccatcttcagaacttttttatcttcccacactgaaaccctgtgcccattaaacactaactccctgttcccttccccccacccagcccctggtaaccaccattctcattattttcactgtgaatttgactactctaggtacttcacatacatagactcacatatttgtccttttgtgtttggcttatttcactcagcataatatcttccaaggtgcatccatgttacagcaggtatctgattttcattcatttttaaggctgaataatctattgtgtgcctattccatattttatttatccatccatctgttgatggacatttgagtatcactgccaccttttggctattgttagtgcatgttctatgtggagcacagaaatgtgatgtttaagtttaagcctaaagtggatttctttgaattatactagccagtcacagatcactcctgggtagtactatggtttgaatgtggtatcccctccaaaattcatgttgaaacttaattcccattgtggtggtattaagaagtggggccttgtaggaagtggttaagtcatgagggctgtgcctcatgaatgggttagtatcattggaaagaggcttcagagagagttttccagtcttgcccttccaccctgcgccatgtgaggacacagcaataaggcgccatattggaagcagagagcagccctctgtagacaccaaggctggcaccttgatcttagattccccagcctccagaactgtgggaagtaagtttctgttgtttataaattagcccagtgtgtaatactttttaaaatagcagcataaacagactaagacaggtggtttctacttttaggaaaatatttttagttcatattaagatagaaacttattctagctcctaaaaatcagaattgttttaatatcctcaggtgctctttaattttttcttacaattgtcaaaaacaagtttaaaatcaagttactaactctgctataggcaggaagctcctggatagatactctggggttcaagtccaatgctgacccgcagttggcccttgaccttgttcaaggcccttatctagattgtgccttatttttctcacccatcaaaaggaggatggacaagtttcttcctgccagttgacattccagagtctagaaaggaattattgccctcaagtaagacgaccttggggaattcagaaataaaaagtatatagctttttgagctctaagttattttggtccatttgagctcaatttgaccagagattgaagataaaagctctgcctcccccaaacttattggtacagcctgcactcaattggttttaccgccttctcctgacattaagggagatgtttttggttgtgtggtgttgaccctttaggtcctcagaaggggcggcaccctcatggtgtctctgcctgcagcagggagtgctaccaggcactttgttccagtgacttatgatggacacagcacagcgcctaggggttaggattctaaaataattcaggtgtatggagacgcagaacctaaaagaactcaggagaaagagaaggtagatatcctaaattttagtctgattttgactcagaagtggatacctgattttggcctacatttcacctctttcagtttttttctgctccatttgggttccctgctcacttggaaccctcaagctggcttgcaaatgcccagagccacagtgctctcatagggtctgcctgttctagggcccatcagccagcagtccagcagggatgaccagtgagcccaagaaaacaagcagtgctgatgtcagatgtgtagcccttctcaagtgctatacattttaagaaatgccttcactgggcatggtggctcatgcctgtaatcccagcactttgggaggccaagatgggcggatcacgaggtcaggagttggagaccaacctggcacaacatgataaaaccctgtctctactaaaaatacaaaaattagctgaacgtggtggtcacacacctctaatctcagctactcaggaggctgaggcaggagaatcgcttaaacccggaaggtggaggttgcagtgagctgagatcctgccattgcactccagcctgggtgacagtgagactctgtctcaaaaaaagaaagaaagaaaaagagagagagagaaagagagagagagagagaaagaaagaaagaaaaagaaagaaagaaaaaagaaagaaaatgtcttcttcagacacctcaactacaaaggagtcagccagtcaagagaatttctcctctaccaggaagagaatatgggtataggagaagcttggagtctctctgccacccctcatgttctctggacaaagtcccaagctgtgcgtttgaatcatcagtgtctacttgtcctgcagaacatcaggaatttaccaggtaatctggtgacatgcctgcaccagaggactgggagaatccttaccgttaaacctcttctccccacccctgaacacataaatacactttttaagcttcctaacgctgtactctgatcatggtgcccacccccttggacagcataaatttcccagtgacctccaattacctgccgctaaagtccaggccccttagtgtggcatgtacgcacctcctcacctatcctccatctttccatttccccccaggccgcttacctgtggcccacatgcaccactcaccatgccccacactctcgagtcatcagtgccacttcctcctggaagccttctttccctggacacctcagccagccatctgtctcgtccctgagagccctaacctctccgctgacttttgtcacccttccctgtgttaaggtgatcgagatgcagaactcccagtggtctttgatgcctcctctcctctcccacccacaccccatctgttgccaggcctgttgattttccccttcaggtgccaactcttctttcattgtattagtttcctattgctgttgtaacagattatcgcaaacatggtggtttaaattaagcttgtccctgcagcctgtgggccacatgtgacctgggatgactttgaatacgacccaacacaaatttgtgagctttcttaaaacatgagattttttggcgatttttttttttttccctttagcttatcagctgttgttagtggattttatgtgtggtccaagacaattcttcttccagtgtggggccagggaagccaaaaaaactggacacccttggttaagttaacacagatttgttaacttatgcttctgcagtttggaagtctgacctaggttttgtgggctgaaaccaaggtgtttacagggatggagagtgttctttctggcagttctaggggtgatctgtttgcttgcctgtttcagcttctagaggctgcccacattctttggctcatggctccttatccatcttcaaagccagacccagtgggctgaattcttctccccattgctgccatctctcgggttctgttgcttctgccacccttttccacttagaagcacccttgtgattacgttggccccacctggataaccagggccagtcgccccaactcagggtcagctgattagcaaccttcattccactttgccatgtaacctgacatatcaataaatactgggtataaggacgtggacatctttgggggccattattctgcatacccatccactgttatagattcaggtttgaactcttggaatgaccatctaatgggctgagttccctcattgcctctcatgttatgtgctgccagcatagatattaagatgtacattctatcatctagacctgttggttccaaaaacatctcttggatctgtccttttctttttgtctccattgcccctaccctagtggcaaacaatcctgtgaaaaaggattgtttacatgtatgggtgcccctccaggcaatattcaagtgtactcttcgaggctgttttagtacattcaccatattgtgcaaccatcacctccatctagttccaaaacattttcatcgccctaaaggagaactctatccattgagcggccattccccattccctcctctcctcaacccctggcaaccaccagtctgtcttctgtctctgtgcatttaccattcctttgtatggatatagcactacattttgtttattttttaaattaaatttaattttttagagacaggatgtagctctgtcatccaggttggagtatagtggcaccgtcacccaggctggagtgtagtggcatgatcatagctcactgtagccttggactcctgggcttgagtgattccccctgcctcaaccttccaagtagctaggactgcaggcacccaccaccacacctggctcattttttaaatttatttgtcagttgatggacatttgggctgtttccactttttggtgattgtgactagtgctgctatgaacattcatatacaggtatttgttttcagttcctttaggtttatacctaggaactgctgtgccatatagtaattctatgtttaactttttgaggaaccaccaaactgttttccacagtggctgcaccattttacattccaccagcaatgtacaagcgttctgatttctccacatcctcgccaacacttgctattttccattgtttttattgcagccatcctagtagatgtgaagttgtattctcgcggtttcttccaaatcatttttaaatgtacaaattgtctaatttcacttctctgcttcacatccttcctattgcatttataataaaccctggcccccatcttggactccaaggagtatatgatcttctccctcctacctctttctctcactgccttccatgctcctcactcagtccacttaccgagcatcattggccttctcctgttccctcaagcagggaaggcaaacacccatgggcttttatttattatttctttatttattttttaacacttccctccttaggtccagagaccatgggctttgaggctcaggggattcagatccaaggtccatttagaagtaaatgatgagatgagttgggcactgtggctcacgcctgtaattagcactttgggaggccgaggtgggcagatcatgaggtcaggagatcgagactatcctggctaatacagtgaaaccccatctctactaaaaattcaaaaaattagccgggcatggtggtgcatacctgtaatcccagctactcgggaggctgaggcaggagaatcgctttaacctgggaggtgaaggttgcagtgagccgagatcgtgccactgcactccagcctgggcaacagagtgagactccatctcaaaaaaaaaaaaaaaaaaagatgagatgatgcattgaatgctaggtatggcgtgtatgtagttcataagaacaccaataaacagtggatgtaaaaagcaacatcagatagatacctaaaggccatgtctttggaacaggggtaaccacctgaagcatgtcctcccttccctgcctttttcctccctcagagcaccccgttcttcattgcacttatgatttgtcaccagccacgaatgtgtgcatctccctgttatgtttggtctcctgcactgggctggaaactccacgttcaccctttatgcctgtgcccagcacagtgcctgacacagtaggcactgattaaatgattcttgaatgactgcatcatcatatggtcacagtaaacagaatccatcactaattatctatttgacatgagcgggtggaaaggcaaagtttttatgcatgagtgtgggtgtatgtatgttttcctagattatagatttgtctaaacattcctgctaattttaagatatcaaatctgaagtttccttggcttgaatttttgaacataggccaaggttgtttttagattcctcagtattctctcttttgtgaaagttttcaaaagtataaacggcgcatcttccgtacaactggtttacattgttggtttatgcagttgagttgtgggcagaggggaaacctcaatgtctgaatgtggctttaccccagcgctgagatatccccgggagagcttggccagtctgagtccatgtggcctaaagatcctccctagccagttccctgtcccacctacattctgtttatttcagaacttctcacctgttgaacacacagcccttcctcaacacaggaccagctcagcatcgggaagctgtattttaagaaaatcatggtcttccagctcagtggaggcatcttagcgggatccaaaataacattcgcttttatcttgaaattctttctgtttttggtttttccccaactctcatccttcccccaccttcacctcagacactccaggttattactgaaattaagcatgatagaaagtgtggactcataggctcagttctgttccctccttatggccagcgtgtggaagagctcctctgctctcatgccttctccatcggagctggttcatcaccttggcctgtcttgggcggagtccccgacttgggagttgtgctgttcgtttgctgtccatcgggctgtaagctccttgaggaccaggcaccatgtttactcacccctgtcccttctgggaacctgggggaaactgctaactggcgtggctctcagaccttgcatggccccacacattttttttctgtgggaaccactaagcattagcaactcgccagtgatcagcagggattagcagcgtttaggctccgcagacatttaatgtgctaattgaggagcccagggttcggccaaggaagtgatttacaaaggtggaaacgggactgttgacacaggtgcatcttattaattactggtttggggaattagtaaaaatgttaataatttgagggattattgttaatgaaggataagaaacttcacaaccatatggtttactacttgatgcgattttcccttttttaaaaaaatacttttaaatctgggttttaggaaggacaagccatttcttgcagaacttattgattgtattacataggtaaatggaaaaatatttcctagaacaattttttgtaacagaaaattctaaaacataccagtagtatgaagtaagaggcacctatggcacatctttgtattattcagtccctcctttatacattcttctgacaagaacgggagtcatgcctcccaggctctgagtcccaggctccgagcattactgaggcagctcctaagaagagagaagggaagaacatttcctgaggatctttgctgtgccaggttccagaaggtgctttggcgcatctcacgtgagatacgggctccttttgcctgctttctaagaagggtgcggtgtgaggtggctggctgcgtggaagaggcctgggaggagtaattccaccagtattgtgtcttagtcttcaagtggccagtgcagtaccttggcctgtggtagatcctgagtaaatgttgactgaaacgaagatgccatggccggtggtgaagcagggatcagtgcaacaatgctgtgagaatacagaggcaggggtggcttttggagggcacctggatcattcccagggaagctgccctctgggcagagtttaaagtatggcagagggaagagtgttcttggcagagggcacaggcccggtaggggagttatgagcaggtaattgtggagtatgggattcccaggggctgggcatgacgttgagagcgggggaggttgaggccagactgtgaagggattcccaggccagcccaggactgacttcagatttacatcctattggcaacaaggagccagtggagatgtttaatctctttcggcctccatcaagttagcctttcagtctgtaacctggcctaagtgttagtcccatgtcatttgaaccccttgcctttctcttttacttaaattacattcacagtgcgctgtgaaacctaattggaatagacaaaacgtggtggaactctgcagcttatggggccagttcatgctcaccttaatgtgcttataatgtacatttaaatactgccagttatttggagctttcaggtgacttcacttctctgtgtattatgtacttcgcttcctacatctgcagttaatttgttaagagaccttaatgagaaacttcaaacagtttaaatgtcaattaccaaaaaagtaaggttttcaagttccagtaatctacccgattggtcatcagaatgtagtcccaggtggatgtaatttaagacatgacattccagagcttcagttacaaagaatttatatatttcgggactaataaactggctccagtggtggctacacttgcaggattgtctgcagttatgactcatctagtaccggcgctgctcagaactttctgtccacggagttcacactggttttgtgtttgggctggtgcttttgaatctgaaaaaaagtgcataaaaatatgccagaaatgtagtaaatattgtgatcatttcattttttaatccgacacttttgagaggaaaagagtattcatcagtactttatcatagatttaattaatgggataatctttaatttctgactcagacatctggatttgtttcttgccaccccctcctttttttctgtgttcctttctcgtctttatttttgatgaagataaaatacttaaagaaagcgttgaatgtgatgatgagtattgttttaacagaaagtaaaatcaaaagcatgcagaataaattaaccttgcattttctcggcaggtcagttagtgggtgttatatccttagttgttggtgctacaaagtaaataatttttggcagctggtttagttttcaccacttctaagcctatgacaaatggtcttggaagatctttggtcttaaaaaggaaaattttctgtgtgcgagttttaagttcagttttgttgggttttgaagtcttttttatgtaagccacttatgtggcattttgttttatttgaatttgaaattttttttaagttttaaagctagagtctgccacattgaactgtttttcacacttggcatttaaaagttaatttgctttttctgtttttaaaagagactaaaaaactaaggtttcccctactaagcatttattagtcaaccacttttgaaaattgaaaaattagtttgtatggttttagattgtttttctcccaggagaaataatgttgctacataatctcagacctgcattcacgtatttagcctgccataagtcactgtcaaaatgaagaaaatgctgaaagttagatatacctgcacatgtgaatttcatgtattttctggtaatcaactctgttttaaaggcttttgggagttgttttctttcagaagcagcccactggtgctgtatttggcatgttgtgtgttattaaaacttcatataaatgcagaggtactaaaacgtgaagtttacaaaacccatcggaacatttttacttgtgtagttagcacgatcacttctccaagtacaataatctttgtgttgtgagcctgtagacaaaactcgtgtctggcatatctgattggaatgtgaaatttaatattttccactagttatttcccaacatgcaaagtgaactgatacccattaaatatatatatttaagtaaaaatagagaggatcagtggcctaatcagctttacagctgtgaatttaggaagtgaattcacaacatccctctctccagagagacgacttgatgacttactctcggtttctttaagtgatatagtagaccttgtttggattaatcagcagccttgggagttggagcagtcatttgcaatattgagtggaaaagttccttgtgcttggaaaagtcagaaggccaggagtgagagacatggcctcatcctttccctggtggctcctcacctgtgaagttgcaccagggtggtaataaaattgtaggagctcattttatgtgaaaccattagcagcctgggaattcaggactagctgcctttcatactttaagacactggaaggtgtcatttataagcatagagagcctgcaggaaggcagaacaggcttgtaaactggagcctgaggctctgggcagcaatcagtgtgtaatagagtttaaagtcttaggttatcagaatcacaaatgggcctttaagtgttgtgggcaaatcccaagaaacatctgtctataaaaggcaggtacaatggccagttatttcctcctggttattgtgatattgttattttctgtttctgcctttgtggatgggagtggggagagaaagggaggggcccttgctacaagtgtaagaataaaattgtaaatgtttgtgttagttgaaaaaaaattgactatggtaagtgtcgcagctaatgtagggtgttttcaccttgaaacagcgactgccgcccagttcctgctgcttcgttcgcggactctgaattccactgctggggcaggcgtgtgtgacaggcagagagagccctggggttgggggaacaaggaagtgtttccagttcccatttggcttatgcattggagggttccccaatgtggggacagcgtccaggttcttggcctgtggaaatgacaaatggccctgacagggggctatcccagcttcagtgtttctgttcaccatcctaagagtggttctttatctgaaaccatgaagaaaaccagatgattagagaagaattcaagaacccattctgtagacattgcctcctgacaagtacaaatgcgtctgttgaaatctcagtgctccaagtccccatctatccgccttccccctcctccaggttttagacaggttacctgattgcccctggttggccctcatcccctcccctatctgggcagcgctctccctgctgtggggttgggtggtcctcctgctcctgggtcatatggtatcgagagatgctgattccatctgcagctccttctctgtactgtggacttcactgcttgtctctttggccactaggaagcatttattctgattctcatgggcagcttgagaggcttcccacagagggaagggtaggcctttaatatttctgtccttcatctcaaagactgtttctttaaagtggacacagatgggattgggctggagagaggtggccccagcccaggagatcatgttgtctgggtgaaaccactgcacgctctggtccctgggctcctattgctcagggttcctttttaaagcccacttgtcgagtcttctttctttacagaggagatgttgtgcttaccctcttgtgaggatctcacagtgttctagcgcctctccttggagatggtatttactggtttgagggtgacctctgctaatggacctgttcagtcaccaggtacagggccttcagttgtgttgtcgaagaggctctgctcacccctgccccaccatatctgagaagtgcccgaagttagttggatgtggcttctctgcctaggtagccttgcacccctgggaggatgggggcctaagctggaagtggatttttctcatctagcagaagcacattcgatactggatacaaagccccatcttctgtttcagaagcagcttggagcatttcttgtttaactgtcatgtaagccccttaagcaatgcttttttcagagaggtatcatcctgataaattgtcaaatgcctctttcaaatccattccttttaaaaaaaatcctcttttctgtttattctggagtcactcatcatgcaaataatatctttgtgagaagtggtgttcctggagttggagaaggctctttagtagggctgctggtcagtacagtccctgaaaaacatgactatttataacacaggcaccagagggttcagagacgtgctaaaagtggagaagttgggggcaggggagtgctggcaaggatgaactttgcctatttcacaagttttgactaaagtagttctgaataagaaaagcgtttgatgaaatcttacctagtataaagacatattatttttggcctctcttttttctttcttctttttgttctttcacctttcccctgtgacctcccattccagctgagccctcttgttcccatttgccctgtattgttgatcttaaccccagctctgccctctcttaaatcctgttcttattcttggagaagactacagtctcccgagctctttctatatgccaagcactgtacttttatacattcatattatcatgaggaaatattcttttgcctattttacagatgaagcaagtgagattcagggaagttaagtaatttatccaaatttacatgcctactaagggatggagcaggagccagacccctgtttctgaagcatgtttgctgaaccactacactttagccacctactgtggatacctttggaaaggaggattcttttaccgttaccaaaaagatattaataaaaataagtccaggtgtggtggctcatgcctgtaatcccagcactttgggaggcagaggcaggtgggttacttgagctcaggagttcgagaccagcctgggcaacatggtgaaatcccgtctccacaaaaaatagaaaaattagccacgcatggtggcgcatgcctgtagtgccagctactccagaggttgaggtgggaggattgcttgagcctgggaggcagaagttgcagtgacctgagatagtgccactgcactccagcctgggtggcagagccagaccctgtctccaaatatttatgtgtgtgtgtgtgtgtgtgtgtgtgtgtgtgtatgtatacacatatataatttatatgcaaatatataatatatacatatattacatacatatatgtgtgtgtatatataatcaaatgcccataaattgaagattcattaaatacagggatagtcataccatagtaatgacgtagctgttaaaaagaataaggtagttcccataaatggtagaatagcttgattgtactaatccccctgtattttatgtagatttgtaagattcacaccaaattttttttttttgagttggagtctcgctcagtcgcccaggctggagtgcagtggcgtgatctcggctcactgcaacctccacctcccgggttcaagcgattcttctgcctcagcctcctgagtagctgagactacaggcacgcaccaccacgcccagctaatttttgtatttttagtagagacggggtttcaccatgttgaccagccaggatgatctcgatctcttgacctcgtgatccacccgcctcagcctcccaaagtgctgggattacaggcgtgagccaccgcacctggccacacacaaagtatttttaaaaactattgtaagtcaccagaaagcaagcaaaatcaggcagaaactggaggagaatctacctcaaaagacaaactgcggtggataaggtttgcaggtttgtagctttaacctgaaggtactcccaaagctaattaagtggccaaaagccgcagccttactgtattgcgatgttagagggcagaggtagaaactggcagagctggcagagcagtcagaaaattaagagggaaaccccagagaggagggagctacagagggcacaaacacccaaatctgcatatgaaattgcacaaatccttggttggctactaaactatgtgtctgcaaacctggtgaaaaagtagcagctttaagcctgaaaaaaactaagcaaagatcttggccactgcctaccatagggaagacagaacttggtatttgtgttcagccaagttagctgtctgctagaacaaaaattagtcttcagagaaatgtgcagaatctggaatctctataacatatcgatcatcatgtccagtgtcctatcagaaaccactagaggccgggcattgtggctcatgcctgtaatcccagcactttgggagaccaaggcagacggattgcctgaggtcagaagtttgagaccagcctggccaacatagtgaaaccccatctctactaaatatacaaaaaaaattagccaggtgtgctggtgggcacctgtagtcccagctattcaagaggctgaggcaagagaatcccttgaacctgggaggcggaggttgcagtgagccgagattgtgccactgcactccagcctggtgacagagtgagactccgtctcaaaaaaaacaaaacaaaaacaaaaaaaccccactagatagaggtagaaatgggaaaaaagtagataatagaagccaaactcaagatgatagagatgttacaattaatagacaaggactttaaagcatctaccataaatacattcaaagacttaataaaaatgtatacacaatgaatgaacagatagggagtatcagcttagaaatagtagctatgggccaggtgcagtgtctcacacctgtaatcccaacactttgggggcccaggtgggtggatcacttgaggccaggaattcatgaccagactggccaacatggcaaaaccctgtctctaactaaaaatacaaaaattagccaggtgtgggagactgagacaggagaatctcttgaacgtgggaggcagaggttgcagtgagccgagatcataccagtgcactccagcctgggcaacagagcaagatcctgtctcaaaaaaaaaaaaaaaaaaaaaaaaagagaagagaagaaaagaaataaggccaggtgtggtagctaatgcctgtaatcccagcactttgagaggcagaagtgggcggatcacttgaggtcaggagtttgataccagcctgggcaacatggcaaaaccccgtctctactaaaaatacaaaactgggcatggtggcacgcatctgtaatcccagctacttgggaggctgaggcacaaaaatcgcttgagcctgggaggtggaggttgcagtgagccaagatggcaccactgtactccagcctgggtgacagtgcaggactctgtctcaaaaaaaaaaaaaaaaatagctatgaaaaagagctgaaaggttagtggttgccagaggttgaggggaggagggaatgggaagtgattgtttaatgcatatggggtttccttttgtgttgatgaaagtgttcttgagctagtggtgaggcttgtacagcactgtgaattttaaactttaaaatggtgaaaattgtgaattttatgaaaagagaggtgaaaatacatgaactaaatagaaatttttaccagtaagctcaatagcagacaaagttaactgaaaaatagatcaatcgtatgtactcagtttgaggaaaagaaaaagattgaagaaaagcaaatagagcctcagagacctgtgggacagtaccaagcagtctaacatgtatagttggagttccagaagcaaaaaagagattagggcagaaaaaatatttgaggggataatgaccagaaatgttccaaattcggtgaaatccattaactcactgatcccttaacaaacactcagcaagataaattaaaacacacacatgcacatgagagccacattgctgaaatccaaaaataagaaagtcctgaaagctgcctgagaaaaaaagaaggtgcacagaaggaacaataatataactaacagccgactgcttatcagaaacagtggagagtagaaggtaaacgtattgaaagacaaaatatcaacccagggttctacgtccagcaaaactatccttcaaaattgaagcccaaataaagacctttataattaaacaaaaactgagagaatttgttgcaaagaatctgactatgagaaatgctaaaggaatttctttaggcttaagggaaataaccccagatgataacttggatctataaaaagaaatgaaccagaaatgatgaagaaaataatcagatagatccatctgtgttgatgtaaacatgtaatagtaataataataaatatttatatagcaattatttcaggaaggacacgcaagaaaactttaacagtgataaccttccccgtggaaaaggggaagagattgagagcttggagtatgaaaaaggagactaaattattattttgtgcttcttttgatcatttgaatattttttaatgtggatgtattacttatttttttaaataaatttttaaatgtcatgaaatagctaggaaaaatagagatacttgatacaagatgagaaaataatgttctgtttctcccttgtaaggaatatgacagaaatcgagacattgtagactgggagtcaggattgggtttctttcctactctgttagcaggacactgtgtcacgtgacaaaggctgtgaaggaggtatcagatcgcgctctctggccttgggcaccttctttccattgctaggtcttcttccccatccccagacgtccctgctcattcccggagcggcagctccaggaaggcacatcttgctctaaaatggcctcctgaacactcctgttcccacacactgtctggcttaatcttactccaaggcaggcagctgcagagggtgccagggctggttctgctcctgggttcccatctcgggtgatcaggacaccatcgtgtgctctgtcacccaagccagcagcctgagagtccgccttttaactcaccttgttaatgaccccaggtacgtttcattaggtcttcgtaatgaaatgtacctgggggtcattaacaaggtcaattgacccaaatccttctcaaatctgccgcctttctctgtcatgatttttataatctgcaccacgccccccacacccccaaccttttccaggatcaaattgagacttctccagtgtttgcagagtgaggtcctgtctttagcccaggccttcctagcctggcccctacccaggtccaaccttgttttccacatgtgagggtccaccctcatctcccagtgaggtcaggtctggccattcagcctccccttccacatgttcagccctcctggctttgcgcagcttattgctttttcctgtgttccttccttgtcttcacatagcaaatcattctcacctccagagatgctgtgtcctatgtcctagaagccttacctattccctagcatgctgaactgagtggtcctgtcccggcctcccataactcttgttaatgctctgtcctactcttggagagaccatgaagactgggggaagaggacagggtttggagttggacagatttggtctcaattctggtctttccatttactggctgtatgagctcaggcaagttgtttaatctccccagtctcagtttcctcatctttatggtgacaatactactgcttactttgctgagacagatggactaaagataatatatataaagtgcttggtgtggttcctattatagctttattcttacaacacttttttaaacattgtgttgattaaacatttacttgattaaatgtttttctctcccattagactatacattctttgagaccagcagtgcttaatgtttgtagaattcaacttttaatgagtttgaattttaacagagtacatttgctaagttaaaagagtgattatattaactttaattgtggaatttcacgtaatgtgaaattcaaagctttatatatattttcagcagagactcttaaaattatgttttcgaaataacaattttatctccccaagcaaaatgccacctgcacctttacaaacactttaccgcagttatgtgaaccttcattgctcacccttgctgcagatcattaaatgtatgcataaatagaattattaatgtttaccaaggtcttaaagtcctggtaagaaaatattgagtggtcaatatagaaaggtcacctgttagctcctgatgcttgaaaacagaggtgggacctggtgagcctgtcttcagctgatgcagtgccagcacatctgggctgggcagggcctccagtgccttctgcacaggttcacgtggccaactctgcttggacagtgggatctgctccctggcagctgggacacctgctccccactgttgagccattcctcttgccagggctgtttgagtatcagccactacattcctggccccctccttttagagagagatctctgattttaagaggcaaggtttaaagtaagacatttcatgtgtagtagcagatattattaactttgttgtgcacagtatgccttggatcttcttttcttgggtagggtacagataaaatgatggttctacgaggggtaagtaggaaaaattagtggttctggattctctccatgccttcactccattatagtcacagtggcaagatggagtattagcaagacaggtcctgagtgtggttgcggtctaatttaaacttttttttttagacttactctctcgcccaggtcggagtgcagtggtgcagtcttggctcactgcatcactgcatcccccagccaggctcaagcaattctcatttctcagcttcctgagtagctgggactacagtcatgtgcaaccatgcctggctaatttttttatttttagtagagacgggatttcgccatgttggccaggctggtcttgaacccctggtctcaagtgatctgcccgcctcccaaagtgctggggttacaggcatgagccactgtgtccaacctaatttaaactttatctttgtaagtgccagggtaatagaggctacccagtttgccattgtgctcacccaaagatgaaagtgctaaggttgagtggaagaattcccaattattaagcccctcctctccctgtgttgaaaattctccatgaaaacccatctctggaggtgtatcaatcagtgttatcactgccctaagccatttctgtcaaatccagtctttccagcatattgcatattccctgtcttgccagtgaaatgtggtaaagaagaaaaaagttgccacagaatgtaatttttaaaaccatagccgggcacggtggctcacgcctgtaatcctaacactttgggaggccgaggcgggtggatcacctgaggtcaggagttcaagagcagcctgggcaacatggtgaaaccctgtctttactaaaaataaaaaaggccaggtgctgtggcacgcacctgtaatcccagctacttgggaggctgagggaggagaattgcttgaacccaggaggtggaggttgcggtgagctgagatcgcgccactgcattccagcctgggctacagagtgtgacttcatctcaaataataataataaaaccataaaattcctacaaagtgtgaatatatatttatgaatgatgtctgtgtgtatccgtatacatacatccattcatatttctgaaaagctttcaaggagaatttttaaacatagcagatgcattaatttgcatacaaagaagccagttacggatcattcttatctagttatccaagtcaacagtgcctttttttttttttttttttgagacaaggtcttgctctgtcgcctaggctggagtgcaatggcacaatcgcggttcactgcattctcgaccacccagactccagtgagtctcctaccttagcctcctgagtagctaagaccaccagctacacctggctaatttttattttttaattttttgtagagatgtctccccatgttgccctggctggtctcaaatgcctgggctcaaatggtccccctgcctcagccttctgaagtgctgggattacaggaatgagccactgtgcccagcttaatgatgctattaaactacacctgttaaccttctacttgctttctgtggttgacaagtaattctctttgcatttctttttactaattcagatgggcttctcttttcttactccaaattattgaaagttatttatttgtgtaaaatattacatagacatacacacacacaatatatgtgtgccttatgcattttacaacatcatctgaacaaatatttattaactacctattgtgtttcagactctgtgctagacatgcgggatttcgcagtgatcagaacagtatctgcccaacagtcccacaaagaaatattaagcaagaataaaatctgtagccacatacctgtgtacattttttgagagcttactatgctctgggcactgtgctaacattttcaacattatttcatgtagcactctcaacaactgtgtgagataagttttatttattgttaccatttttccaaggaggaaaccgaaacacagaaaggttaagttacttgcctgaggtaacttagcattgatagaattaggatttgaacctgggtagtatgactcttaggtccccatgagctggcacacaggttgccaatccatcagttaaccttcccatcactgggtcagagagccaaggagcagaagggggatagaacttccccagtaccaaactaaggggctgagctgggatcgcaaccacaggttctgttccaaagctggggctctttcgacaaggccatgcccgccttgtctcttatgtatgctttttcacttgaggctgaattttaggtctgagtcaactgcattttgaaaaaaatcatctgcttgaagaccctgatgatgtaacaataaaggccattggaaaaccggcaatctgtgaatcttcatatagatgaaatatccaggttagaatttatcatcctaatctggatatttttgagagtgaaaggagtactgttatagatgctggggcatcaggagccagccaggacgtccaggcaagccggggcttgtggtcactctgtggacacgcagcatggtcattaatgcccacacaatgtgtgtattgttatttgtagattccattactctttggaatataaacctctaagcaagctaaaataactctactatgctttaattatgcattgttggtaaccataacaataaatccttggccaattccaatccaaggacataagcatttagagtcatttttaaaggagtgctccgatggtttagcagtcatgtaaatgcatttatatgtaacagaagacaaaaacaataattaagataaacataaaactcatcccttttgcctacagaggcaactctatttttagaactacaaatttgggctggatgtggtgactcttacctgtaataccagcactttgggagaccgaggtaggaggattgcttgaggccaggagtttgaaaccagcctggccaacgcagcgagaccatatctatacaaaagaaaagttaaaaacttagctgggcatggtggcatgtgtctgtagtcccagctactgaggaggctgaggcaggacaaccacttgagcccaggagttcaaggctgcagtgagccatgattgtaccagtgcactctagcctgggcaacatagcaagacattatcttaaagaaaaattgtatgcatagcctgagtacatgatttgaatatatttaggaaatagataatgggataaaatattcaaaagtgaaattatgcaggaaaattccaggcatgtgattgtcatatacatagttgaacatttctattctctatgtagtttagactttaattaaacagaataatctgactttaatctctcttgatactataaaagtaacttgaatttgttcattttttgttttttaatcatgaaaactaatgcccaaagtacctgtctaactcaaaataattgtttcttttttcacacaaagccaattgaatagattggacaattgcatacttaagatttaatatatttgctcatcatattatgggttttaaaaaatcatttatcttggagctaagtacatttcactatggttttttatgttcattgtcgtaaaatattatctttaatgtttcactaggttcactaatgttaggctgagggtgtttattgttgtatcagatatccttttgtgttttatttaaatctatatttactagttttaaatagtttgccttattgctaaggctagtggaaaatagttaaagtgtgagaatgtggtttttccctgtagtgttcttttgagtagttgacagctgtgaaaacatttagcaggcttccctccttttcagcgttggttaagctctgcttctaaaggagtattcctagcagagcttgccacagtatatccaaaacattgctgtattacagacgcaacatggtttaaaaggaaaaattgagtgtgggtttcaagttgacacatgataaaagtagccctgaagtgttcaattagaaactgaaggcctggatctgataacttcatgggcagtgcccctgctcttttgtcttacgaccaataggattttgactgctcaggaaatttgtatgcatgtacccagatatagacctaggcacctaaatgcacacgtggatatatacgaatatatggtggacagtgcagatccaagctactcctgctaacacatttctggaaaacattccctttatgggaggacttaacaaaaaaattagtagctagttttactttggtttacatatattgtttttctaatatagaattctcattagttggttttatgaatcatatcaccaaatgaaaatttgaaaagtatgtaacagttttctattgagcgttctctgaatattcttgccttcagtcctgctgggagccttttctcagatcaccagtgcaagcctacagtcatacattgtttgtagttgatacaacctcaatgatataagttttttgatgattttaaaatatgagtaattaatcatttataacctataggttaaaatgaattataagtggatgaaggtgggaacccaaatgaatcaaagctatttaagtttggtattgacattgtgcatcttcccattatttattataccaaaaaaatcactttatttcttaaaaatagtacaacacggccaggtgcagtggctcacgcctgtaatcccagcactttgggaggccgaggtgggtggatcacgaggtcaggagatcaagaccatcctggctaacacagtgaaaccccgtctctactagaagtacagaaaattagccgggcacggtggcaggcacctgtaatctcagcacttttgggaagccaaggtgggcggatcatgaggtcaggagatcaagaccatcctggctagcacggtgaaaccccatctctactaaaaatacaaaaaaaaaaaaaattagccaggcatggcagcgtgcacctgtagtcccagctacttgggaggctgaggcaggagaatggcgtgaacccgggaggtggagcttgcagtgagctgagatcgcaccactgcactccagcctgggtgacagagcgagactccatctttaaaaaaaaaatagtccaacacaagaaggaaagaaggtacagaaatggaaagttaagaatgaatcagtggagtaaaacatttctgagattggtgcattttccttttggaaatgtcattcaaaccatatgaaattaaatttggaaataatgttctgcagtctcttgaatgggatttaaaatatgacaatgcagaaaacacatatggggatgaaaacccataggacatgtctcaaggaggacagacaccctggggaagaacacttgtgagggtaccaggctctcagacacaaggaaagaggaatctgagggattgctgggaaggattctcatcttatgaccccagctgtgggtagatttggctggggagcccattctcattgcagggggcggtggcctcagccctgtgcatgctgactcttcagtgctgtgctctggctgaggcgtgcctctagtgagggtgaccctgggcaccgagcatattcagtcaccatcagccaaagctggttgtaggagggctggcggtggtcttgggaatgttgcttgaatccatcttggggtgaaaatcagagtattggctcatttctattttttatgattattgttattattattattattattgagacaggatcttgccctgttgcccaggctggagtgcagtggcacgatcacagctcactgcaggtcacagctcccaggctcaagcaatcctcccacctcagcttcccgagtagctaagacttcaggtgtgtgccacctggcctggctcattttttaatttatttttgtagagatgaggtctccccatgttgtccaggctggtctcaaactcctgggttcaggtgatccttctgcctcattcttcccaagtgctggggttacaggcatgagccaccatgcccagcctctccttcctgcctgcctgcttccctccctccctcccttcctccgttgctcttttattttctttccttttttttcctgttgctcaggctggagtgcagtagtgcaatcttggctcactgcagccttaacctcccaggctcaaaccatcctcccacctcagcctcccaactagctacagctacaggcatacaccaccacgcctggctaattttttattttttgtagagccaaggtcttactatgttgcgcaggctgctctcatttctaatacactgagctcaactgcttgctgggtgaggcctgcatgaggactttactcatgggctcatagaagcccttttaagctgcttagtgtccttagagtctccagaggcatccctaacccagaatcttttgactgtcctctggagagaaaggcagtaggtctgtaccaagaccaaggggcttgaaggcttggacgctctgcttccacctgcctctggagtggccagaagtaatgcctgttctcatgaccagccagtttgcctcactgctccggtgccaaaggccaagttttgattggaatgatgtctgtatattctgaataaccaggaattttgtttttctgatttacagatcttcaggcttttcatcagcatgatttgccatctctgtctttgtcatctagggtctgtaattatcctcaggttttctgccaatacctgcattttcaaccagttagaaaaagaagagctaaaacaggtagaagcctgaaaccaaggggcatatgcatttctgaaacattttcaagaaattgtctcaattttatatttctgtttataattataatttcaatgtccagtggaggaagttgtgagactcaatgtcagtagctaccacttactattctgtgcgcctcggttcagattgtttggggcagtggtgttttatgttgtgggtccaaacccatgagtcatctgggaagttaatttattaggtcacaatgagcgttttaaaaaatgaaccataggcccggcgcagtggctcacgcctgtaatcccagcactttgggaggctgaggcaggtggagcatgaggtcaggagttgcagaccagcctgaccaacatggtgaaaccccgtctccactaaaaatacaaaaattaactgggagtggtggcggcgcctgtaatcccaacttttcgggaggctgaggcaggagaatcgcttgaacccaggaggcggaggttgcagtgaatccagactgcgccattgcactccagcctgggcgacagaacaagactctgtctcaaaaaaaaaaaaaaaaaaaaaagaactgtaacataataggaaatattcaattctgagcccatcacacattttgtcttatgaaacttttggttttttatatgtggtgtatgtatgtatatgtggtgtatgtatgtatatgtggtgtatgtatgtatatgtggtgtatgtatgtacatgtgtatgtatgtatatgtggtgtatgtgtatatgtggtgtatgtatatgtggtgtatgtatgtatatgtggtgtatgtatgtatatatggtgtatgtatgcatgtgcaagctctcactataaatacacttcttcctgtgggttgcagtaaaaaaaaatttgaaaactgttaccttaagactatttattttaaaaattttaataggtacatagtgtatatatttatggggtacatgaaatgttttgatataggtatacaatgtgtaataatcacatcaaggtaaatagggtatctctgacctcaagcatttgtcatttctttgtgtttcaaacattccagttatactcttgtagttatttttaaatatataataaattattgttgactgtagttatcctgttgtactatcaaatactagaacttacttctttctatctcactggatttttgtactcattaaccatccccagtttccttcctctaccccactacccttcccagcccctgataaccaatattctagtctctgtccccatgatttcaattgttttaactttcagctcccacaagtgagtgagaacagttgaagtttgtctttctgtgcctgacttatttcacttaacataatgtcctccagttccatccatattgttgcaaatggcaggatctcattctcttttatgactgaatagtacttcattgtgtatatgtaccacaatttcttgatccatttagctaccgatggccccttaggttgctcccaaatctttgctattgtgaatactgctgcaataaacatgggagtgcagatatctcttcaatacactgccttcctttcttttgggtatatacctagcattgggattgctgggtcatatggtagttctagttttagttttttgaggaacctctatgctgttctccatagcggttgtactaaattacattcccattaacagtgtacgatggtttccttttttccatatcctcgctagcatttgttattgcctatcttttagataaaagtcattttaggccgggtgcagtggctcacgcctgtaatcccagcactttgggaggctgatgcgggtggatcacgaggtcaggagatcgagaccatcctggccaacatggtgaaaccccgtctctactaaaaaaatacaaaaacttagctgggcgtggtggcgggtgcctgtagtcccagctacttgggaggctgaggcaggagaatggtgtgaacacaggaggcagagcttgcagtgagctgagattgcaccactgcactccagcctgggcgacagagcaagactctgtctcaaaaaaaaaaaaaaaaaaagtcattttaatggggtgtgatatcttaccgtagttttgatttgcatttctgtggtgatcagtgatgttgagcaccttttcatatgcctgtttgccatttgtatgtcttcttctgagaaatatctgttcagatcttttgcccagtttttaaattagattattaaattttttttttcctattgagttgtttgagcttcttatatatcctggttattaatcctttctcagatggatggtttgcaaatatttttccccattctgtgggctgtctcttcactttgttgattgttttcctttgctgtgcagaagctttttaacttgacatgattccatttgtctatttttgcttcggtcgcctgtgcttttggggccttagggcaatttctgatccagggagagggctttctttaaggggtgtggggcatgaataagccaccagcaatgtcagggtatcttctttcctgtggctgagaaattccctaatttaaacttaggattctgtttgccatgaacatgctattaaaatagtggcaccctgggacactgtggggttcagtgggcttttgtgagctatcctgaggtcctaaccatcatttgtgacattttttccatggggaaaaattcattttcagttccaaagaagcaacttattggtgaattattttgagcaggatcctgtcataatcaggcactgcttttatattttttctgtattcagtagtaaatctacttgtaccttaagcagtcatcgcactcctttagccccttttaatttctaatgaggagtggtgtgttataggagtttggggtggcctgggggaagaagggttgctgaaggatggagctcctgaaagggagggttaatgaggatgtgtgtccaaagggtgaatgtctgtgctcctcaccagggagaagggcatcttgcatttacaatgatttataattcacctgggtcaggttcctctgactataggagccaattggttacagaaatctttttttttttttttttttttgagatggagtctcactctggcaccccggctggagtgcagtggcgtgatctcggctcactgcaacctctgcctcttgggttcaagcaattctctgcctcagcctcctgaatagctgggattgcaggtgcccgctaccacacctggctaattttttttttttttttttgtatttttagtagagacagggtttcaccatcttggccaggttggtattaaactcctgacctcgtgatccacccaccttggcctcccaaagtgctgggactacaggcgtgagccaccacgcctggctggttacagaaatcttaatataaggagctcgttacaaaggcaagcataccctagatctgcctgctagccctgcgatagctacttctcagtaccttctgtgccagacactcttctaggcccagggatacagcagggagagaggtgggcagggccccttcccctctggagaggctgctgctgggccctccgcacgctctggcctcccatgctttgggaatgcttgtcactgccaagctgtgcagtgcatcaccatccatggtgctcatgggcctgaggaccactctgcccacacctaaggggggctgggtggccagtgtttgaaaggcttataagaaagatcacaagaagtttcttcttgagaaatgctacagtctttaaaaacaaaacaaacaaaaaactacttagaattttgatagccccagctcaagaaaacaataggtaggacacaagcttgttcataggcagcagagaggtccaaagcaatgtgcctcaaatcaagacgtgtggctctgaaaaaccttcttagggaaggctcccgccccacctagagcttcccaattccatagtatctaaggccttgcaaaatctacatctgtcacacgcccccccggccccgccccccatcacaactccatagtgggaagaacttatttcagtgcctatttttcttgaggtttataaaaacaaaatgtgtgaagggaatgtatgctgattctcttgggactaattaaacaaacagattcagagaaagaaagcagagaagatttaggacagttaaaatgtaaaaaatgtaattttggggataacagccgtcaatttttccactcgagtgtttttccaaagggcagagggcaagaagcatcttaagtcctctcgaagctgagacacatttcaactggagatattagaagcaaatttggtgcccaagacaggtgccagattttaattacagttggcatttctgagcatgcttttggcagaggtggccatcttgttggaaaagccatagattttgacactagcagtatgggtgcccagttgagaacgattgcaaataatttccctcctattttcatcttgttggttgtgagagaaaacttcagtggctaatatttaaacaagatattctctgttcagaggaaacagttcattggaattgtcttggtggcttggtgtgttggctctgggggtaataatttctatcttaaagtctttaaaaccagttaaaacaataaaataggatatttcattatgagaaatgaagttggcatgcaccaggttttccattaagttccaggtcacagacaaataaagaaagtatgttcgggggggaaaaatcctttttaaaaataattagggagctgtctgttttgttcaccagatggaaaatccgtagttgtgggtggtctgtgttggagagggcatctcacaattggcaggactatgcctttaacttttcaagtcctcggacaaaaatctcaacgccatggactattcagaaggctccgaatgttcatcagtccttccaggtctgcttttctgaattttaccagttttctaacaagagtgtgtaagcaaaatgattatggaatgccgaaataaatagtccattgttcgttgaattctgaaacagcattcctgctagccctggttttttgtgacttttcttgctgtcaataccttatgatgataatctgattagtggagctgcctgcgttactatttaaaggcccctttttcttacatttctgtgttccagagtagatagggcagccagatgtgctaacagcataagaaatcatcataagcttgttatttattgaagatggatattgcactgttatcagtgtttagggtcttttctacacttgctttgattctggtcaaattaattcaataagaaaatgtacttttcttactcctttcttgaactgataatagaatgttagctacctagtgtcactagtattttttttatctacacatcaaggtatcatttttttctagctcagtcttatgttttacatggctttacatctgcaagttggactttgaaatgaatattttatgtttgaacataaggatatatatatttttatatttcattcatacatttaacccatccccaaaattttcttaaaaaacttaataattacaggagatgtaaattaataaaatcatctaggatgctaaatgcataaactttcaattgagtgaaaaaaagccctggaacgtaaatcatttttctcggacagccaatgtgtttggctttggatgtacatcagattctgcctgtgcatagtaaaaatggcaatgatttattagttccatctccccccagcacagatgctgcacagtctgtcccttttctgggcactaaacagtgggttttaaaaaacataatttcactcaagttttccgcttgcattctgtgttgtactattaatagcaaccctttgttattcatgccagctcgcttctagcataagacaatgatgtggggaaacggttttaactaaaatactactaattggcacccatttttcatatactggtgcaggtgcagttctgtgaggaatagaagcacctctaaaaattatgtcatgaagatagaaaagctaaacagttacacagttaagtaggtgtacctttgcaatgtcattgtttctttgaaaaatcttacttatttgccgataagttgaagggtggggaaaatttggaatattgatggaggacttatgtgttaaatgttctatgagtccaccaggcgctgtggctcacgcctgtaatcccagcactttgggaggccaaatcacgcagactgcttgagccgggagcatgagaccaacctgggcaacagagcgaaaccccatctctacaaatgatacaaaaattagccacatgtagtggtgggcacctgtagtcccagctactcaggaggctgagatgggaggatcacttgagcccagaagttggagtctgcagtaaacagtgatcatgtgccactgcactccagcctgggcaacagagcaacactttgtctcaaaagaaaaaaaaaaaagttatatgatgcttcatgaaaaaaaaagaaagttttcagcctgagcaatatagcaagacctcatccctacaaaaaattttttaaaaatcagactggtaggccaagcgcagtggctcacacctgtaatcccagcactttgggaggccgaggcgggcggatcacgaggtcaggagatagagaccatcatggctaacacggtgaaaccccatctctactaaaaatacaaaaaattagctgggcgtggtggcgggcgcctatagtcccagctactcgggaggctgaggcaggagaatggcgtgaacccaggaggtggagcttgcagtgagcagagattgcgccactgcactccagcctgggcgacagagccagactccgtctcaaaaaaaaaatcagagtggtatggtggcgcacacctgtagtcccagctactgggaaggctaaggcaggaggattgcttgagcccaggagtttaaggctacggtgaactatggttgtcccaccgtactccagcctgggtgacagaatgagaccctgtctcaaaaaaagaagttttcaagaggggaagaaataagaagagtgttagaaacctcagttgcccatctactttcctctccttgcccagggtgacagaaactgttgccaaattctcactggcagcaacttgagttttgatttggctcaggtacatgtgctcttctagagagtaaggtcagcacagaggctgctggagggtgctggaggctgcctccatggactctagcaccacctttcctcgtcctgtagctgaaatccttggagtcattcttgcctccactagacccttggattctgtgcatctccacatggctcccagccattgtggctctttttttctgggactctcctctctcctgtccatcttccagaagtagctttctgaacacagacgtcattgcgctcctctccacaagcagcagtcactctcaacactgaggaatgaagaccttacagtgttctttacaccctaacccaagattaccttcccagaatcatcttcctaccccatgtctctgaccttccaatcacattaaaattctcagggtggtgagatactccagctcctttctgtctctgccatggctcatgctgctgcttctccctacagagccctcctctcatcttccttgagatcttgctgaccaaatatcttctcttctgatgacttagcagtcacccacactgccgtgggccagcagacacccttcctctgccttccagtagctttgcccaatgtgatctctgctctttgtaccctgtgctgtctcccatgttagatccaaccacctaggtcatagcgctactgctggtacctgattgcaggcccagcatctgtcttggtgccaagcacatgacaagaactgaataaataggccaggtgaggtggctcacgcctgtaatcccagcacttggggaagccaaggcgagtggcctgacgtcaggagttctagactagactggccaacatggctaaaccccatctctgctaaaaatacaaaaattagctgggcgtagtggcgcatgcctgtaatcccagctacttgggaggctgaggtgggagaatcgcttgaacccaggagacggaggttgtagtgagccaagatcacaccactgcactccagcctgggtgacacagcgagaccccgtctcaaaaaagaattgaataaatattttttgagtgaaatggaattctgggttgtggctttccatcagttaagattcttggttgtggccaggtgcagtggctcacgcctgtaatcccaacactttgggagggagaggtgggtggatcatgaggtcaggagtttgagaccagcctggccaacatggtgaaaccccgtctctactaaaaatacaaaaaaattagccaggcctggtggcacgtgcctgtaatcccagctacttgggaggctgaggcaggagaattgcttgaactcgggaggcagaggttgcagtgagccgagatcatgccattgcactccagcctgggcgacaaagcaagactccatcttggggggaaaaaaagattcttggttgtaagcaacagacaccacatctggctttggcaagagggggttttcctggaaggatatggacacattcacaccgtcggtggaaagcaactgtaggcatgccgacatgaatccttctccattgtgtccctgctcagccacgagaacagtgtgctgccagggtgctcagtctgtaactctgctcaggatgcaggctccagggagggagtgtccaactgggctaatagggcccaccctttggctctgggagagctgggctccttgatgataatcccagcacactgtcagctgtgggtaggatgaggcaagttcctcagggggtgaagtgtgttttgggatagtcaacagccagtgactgttcaccacaggactaaaccttccatttccagtgctccagtgccccaactggcctgtctggtgtgatttgccaagtgttctgagcaagcagggaagttgtccattaaaatacagatattggccagacatggctcacacctgtaatcccagcactttgggaggctgaagcgggtggatcacttgcactcaggagtttgagaccagcctgggcaatatagtgagaccctatctcaattaaaaaaataaaaagcagatatcctgggaagggataacactatagcccctgctagccagcattgatttgccaaaagtaggacctgtgggtgcaggatccagagtagccatggatggatgaggtgcgaaagggtcccgaatgttccagcaatgctacccaaatggcaagtggtgtcgtggcctctttcacctccatactcagggagaagccactcagaggcctccacataacaggcaggctctcgcctgggtgtcggaggtgaggatgctactgaagcttattgcttcttaagaatcaatcaaatcaaaacaatggatgcccttctcccaagtggaagggctgtgctggccaccttgtatgactgacacaaagttgggaagagttgcagtcatgagctggggagacacaccctaaaagcagatgagctggtggcggtaaataacactcccatgacgacaagtgggctttgcacgtgtgtggtagcagggcatggccctgggggaggtggggctacctgaggaaaatcacaggaggcaggaatgtatactgtttgttgggaaaagacaagccaatctgaagggcaagggtttgtagaggggagtggtggagagtgaggttggaagggtgtttgggtccagttgtagacagccttgaattctaggcaaagacttcagatgttgttttctaagcactaggagcacctgtggatgtttcagaatgggagtatcatgatggatgtactattttttaaagagcaggaataagcagcaggccactgctaaggaatctgtgtcatgaggctgttagcctggggacaaggaggaccggccaaaaaaaaaaaagtcctgtatataagggggagcacccagcacacttaggttccagacctccattcctagcaactcacctgtaactcctggcaggggtctctgcctccctctactcatccaaagatcatggtgcttgttcaccagccttatgatgatccaaagaaatagtgatctttcatgtttaaataaacctacttaattacgtgcatctgtttggaaattcagacacaccacatgagaagctactgggacttttttctccttttcttggcttctcatttgttctctagctttttctttttttttcatcctggccagttattaaccttctcctccacttttgagtctcataattgtccagatctcccaggacgctgacagtgtggttttggttcacttgttccttctcctgctcaaatttcaattgattcaagggtgatatgctgggtatgatgggctggacatgcccattttcattcaactcatccataactaggatataagtgaggatacagatttgggtgttatggccaaaagatcttcaaatacaatgactttatcaaggataatttcttcccccctcacttgaaacatggttaggtggtgcagggctgataacgatggctcagtgaggtctcaggctcctttagctatggttctgccaacctcagcacatggcacacatcttccccaaggcggctgcttggtttgctcccaccacgtggggtagggggacacatgccttcctttatggggacactatatttctgctcaccctgaccacatcccatcaatcagaactttgacccatgaatacactcagatgcaggagaggctgggaaatgttttccttagctgggcatccatggacctctccctgggtccatcctagagagtggagtagcagcatttgcaccccagacctgaggggtagctgaggctgggctggcagtggggagtgaggccaggagcttggatgtgcaggctggcatgtcccacacatatggggcaaagaggaggggctggctggggctcgtgtcctcctccgtaccctcatcccaagccccagtgcggtagggtgggctgctccaacccaaatcttcttctcccaagtcttctctttcccagcatattatgctgcttccatttcaccatagtttcactcactatcaaggtctccaaagcaatcccatcatctacatattacttgattgttgtgtacagggtattgggtgaaaatgaaggtgggcagagcacatagcctccaacctcaaagccagtaatgtgccagatgaaaggtaagtcacagtctttagattcagtagcattttaacaaaactaaaatgtcaggccggatgccgtggctcacgcctgtaatcccaacactctgggaggctgaggcgggctgatcacgaggtcaggagatctagaccatcctggctaacacggtgaaaccctgtctctactaaaaatacaaaaaattagctgggcatggtggcgggcgcctgtagtcccagctactagggaggctgaggcaggagaattgcttgaacccgggaggcagaggttgcagtgagccgagatcgcgctccgaagtccattctttctgtgcagtggctgatctatcagaagaagaacccccttccccaccaggcctaagaacccatgggagtgatggcccagcactatggtgttgcatttctttcttttttttttttttagacggagtcttgctgtgtcatccagggtggagtgcagtggcgtgatctcggctcactgcaatctctgcttcctaggttcaagtgattctcctgcctcaacctcccaagtagctgggattacaggcacctgccatcatgcccggctaatttttgtatttttagtagagacggggttttaccatgttggccaggctggtcttgaactcctgacctcagatgatctgtctgcctcggcctcccaaagtgctgggattataggcgtgagccactgcgcctggcctggtgttgcatttcgttactggcaagatgatgtatgctctttcacgtgcccacatgcaaaggtgtgactcatggaatgaagacagctcagcaacctctagttgctgggacagaaatgcaagtcagtgggctctggcctttctcccaggctgtgttgccaccttggtggctggaggggcgctactagggggtgtgcttggcagagcctggggtggcgtcctctttcatcccactaaataacacattggtggcttgatctgccatgaagctgacaatcagagcaagtatttgaagcctgggaagctgtgtgggccttgcttgtgggacctggtgtcagctgatgacgtggccctgtctgggtgcccgtgagtcagatggcagggatggcctgacatcatgaacactagctccacctacgtcacattggacttgactctttacagagcacctaggaagagatattgatgagtgaaccattgcccagtcatcgagttaattatttccccccagaaaggttaacatactgaggacagagagggcatgtgtaggcggcagggcgcacttttcatttagtctggttcgcaggtgcggtcaagacgattccttattgtcttggagccagcccttttaagccttcctgcacagctctgtgacagtctcgcggggagacctgtgaggccactttccttttttccagacccacccccacctttgagattatcactcttcctgctttgttttctgaggctttttggctttttagtttatttgtaattagagcagaaaaggtacagtaatcggatagaagggttgggagtgatagaatgagccaggatgcggtggagaaatggggtggagaacccccagaccttagggtggcgtgtttgtcagggagtagaccagggtgcagttctaggcagaccactagatggcactcacacattggtgttcagtcgggtccacggcactttccactttgggcttctgtaaaatctccccatgaactagccaaagctttgtatctgtcatcccgccatttgtccctctaacctctcttgatcgtctacagataggtatatatatatgttcctctctagttcatttttctcttaacatttagtgaccttaaaaacctggcagaaataccttcaaagcctcccaccttgttagctgcattgccgcatttttactgttctcctaagccaatgtttacatggcagtaaatccatgtttagagtaggtaatagagaaacctgtttctctctcagtcactctgagggtatgtttgataaagaaatggaaattgagaggatgagttattaaaaggattaataggtaacaaatttttttaaaatttccattcaaaattatgggttggtaaattgtaagatacttaaaattaatgagttgttttatcaaatcattttctgttgttagagaattttcagcaagctgagattcaaatgcaaaatgtcttattgcatactgctggctctaggaaggaggagggacagacaggaaatcatggttgatgttatctttaccaaggtgcatgtggtgtgaaagcaaaaccccatcttaaattcatcatccgttctgatgttgcacagaaatgaaaattaatttctatatgtcaactaaaatggattctgctcctgcctggttcaattctgtcttagctgcgtggacatcttggggagctgctctgatggtacatgcagacgtgcttcatctgtgcacttcttagctgagataacagtgctccgagccccactgttaaggttaacctgtatactgcagaaggacaacagatggaaattctggtttgcagccactgcagaaaaataaaaacatgttccaaagggaaaaggatcttgtatttctgcgtttgaacctttgatccgcattcacatctgaagggagggctaaaccttttggtggagacacatggctttgcatctgtgaaaacacagctgtatagagcaaaacaaaactagtggaaaatacaatggttttgctgtgtcaggctcaccgctaatgcttgaattctatataaatattgtcttttgatagttctttcaaaaatctttcttgactttccatataattgtccaataatgttattcttttaaattcagatttggggctttttaggattaaggcacaaatgtctcttttcttttaaaaaggcagtaaaataaacagattgtagttagatcataataacatctaaattttgacctaattagagggggagatggggaaaaaaactctttaaaagaagattaaggtaaagttctaactttatccttgattctgaattttttttcttttttggaaatattgcatacattttatactgcaagttacaatgtgaagggcctttgaagcactctaaagagacttagctgctttgttttgagcaattaaggtttgttattgagtgaattaagcagctctgctgtggctcatctgtaaatagtggtcttcagcgagtttcttgatccgcttttcccaggaacagaagccaagtcggcttccttaggagctgctcgccctgagtctccatgtttcctcgcagtccggggcagaacccaagcccgtgccttcctcgccctgccttcggagtttcctgctattgacctggcggggcgcgccagccctccctgcccgctggtgccgcggtccctctcggctgcagcagtggggcacagggacgtcatggacaaaagacgaggatgccagttcgatgtgcgagcagaaggccgcctgcgtgcgctctgcagagcaaccggcccggtttcataaggggccgccggcaggggactgccatggcgccccctcctaccctttttggcaccagcagcttcatccgcaggcccactcggggtgaatagtgtgggagctctcaagagaaagaattttaggtttgtcgatagtaatcaccaccttcagcgctcctcccactgctggagagaccgcggactgggtgacaagtcttccaggctcccagaaagtttctgctgcaaagcgcagggtccgcctcccacttccaggagggaccaggagggaaccatcgcgaaaccccgaggctgccggggactctgactgaggcctttcctcctgtgtccctctcccccacgccggcctcccctcctttcaactctctgcgctttgaaaccgcggagttggggtagctaggccctccagcccggcgacaggcctcggccacaggcagcggggcggggtgtggacaggaacaaggaggtggggtggggaggaagcctcgggcagagcaggttctctgcggagtttcggcagccgggtttatccattttgattaaagaaaagtaaaaaaaatcccccaaaaccaaacaacaaaaaccctctcccaacccccaacccgcctccacagctgcattttgttcctgggactgttggtgtcaccagagcctctttttttatgcaatcctagactccattgcaaaggacttgtaaagcctattaatttttcaggcaaaacagatcaagcctgcctttgatgctgctgtttcctaatttagtattcaaaggtaaagaatcctactaccgtctcttcactttttacataattaaaagagatttttcccccaggggcaaagaactagttgcttagtattttttgaagtgaaaggtctaactttatatcacatctgtttttatgctctttcctaaacataaccaatatttactctttgctggtacttagttgcatgctattcacccttgcattttaatttctgacagagaggggattagtattcctcttctaaatcatcctctaagctatgtgtgtgtgtgtgtatatatatatatgtatatatatgcgtgtgtgtgtgtatttctcctctaacaaactgagagtgcaatttaaaaaactgtagaatcagtgattgccctaacttgtgcatgactcttgatttcacacaggagcattcaaaagttccgttaagtgggctttcacaggtttccatctgctgtgtttaatagcaaattgcgacccttcaaaccacttcaaggccttttgtgttcttatctgtgcatttcaatacttgctggggaagtgccttcagtttcactacatatgcaaaaagccaggcttgaattttttgacacccccttttcatttgttggtggagtcctgttttctattgtttgcttgttgatgttggcaaaagtcatttatttaatgatgccaggaatactatgccctattctttattggcaggaaatcctaaaacatccgggagtagtttaaaaattaatgcatgccgttgaaacttacatattggcatagttttattttcccatcataaggtagatgatattttaaaggtattatatagtaatagtcaccagaagccaattaaaaccactaggattctatcaaaaacctgtttggcggcataaataattgatatgtggaaataaagcagcattctctgggcaggggcctcctgtacagacctgggtggcgttagcagtctctcttctgtgaaccagggggcgatttctgggcataatatcacctggatttaaaaaacttaataataaggccacacacgcatttttaaaaaaacttcccttgcctgtggagacagagaggagatagcgatgttattttcaggtgtttgagcttcttagagaaaaagaaacaaataccagactccttaggagctaggtgcgaatggaataaattgaggcactccagcgacacatccagcttgttttaaatgatgtgattaaaaaggacatctgagaacaaatttatgaagttgttatggcaactgaaatacttggattgaaatgtgtgtatctaaaacatgaaagattgcaggaagccggagaaacaagcaaagcattgtgtttgggaaaggcaattgaacagtggtagccaaatattattcctctgtcggtcatccttcagggtaactgcctcggtttccacttttaaaaacgtgtggtgattgatgctttcatggactctgttgccccaagtccccaagccttgtaccagcgtttgctcattggtcctttgacctgttgagaacacaatctctgtattgtgttcaatgcagggatgcatttagagttgcccctgcatctacccattaagtttatactcctgtgttctcatattaacgtctgtgtttgcgaatagtctctctagtctttgattcactaactcccccaattctaacccaccaatggccaccaacaaacagccacactcaaaggactcaacatatttaaatattccctagaattctttgctctgttctaaaagctatgtatcccgtctacataatttgattctattgtaatttctcatggttttaaaattttccttaccagtacttgtaagagtattgaataattgtttctttcaatcacaggcaaggatatttaaaattaacatgtggaaatgtgtgttgcagtgtgttgaaaaatcagtacttgaagtcacatctagaatgcttccgattttttccatcattagatttcagatgcagtgtccaaaaaaattgtttttaaaaaatgttgctacaaatttcttgcaatatattttgggtttttcactttaaatgaaaaaatagttaagtgtcaattttagtgattttagtagaccatcccattaaaaatatgctattttaattgaaaaaaatttttgacaaaacacatttacaccgaaaaattcaaacaaaataatttcttctttaacaatattgattgttaaatgttgattaccaagttatttggtctccttaattttaagcataatactctttactttgaatagtcttaatccctaaagcaaagcaaagtaaaagagaaaaaaaagtagaagaatttccagaaaattgtaattcccttaaaccatgaattagaactttttactcttactgtagttactctagtttttttagttagacatgagggtacaatcaaacagcttcttttttgtaacagattgttttcctacttcttgaaaaactgagatcaaaacatttttctattctgttgcaaaattaactgttgttattctgtcagacgagttattcactctaaatgtctttttaaacctgtatatttatttttttatccctttttgcatatgcacatggaagtgattccattttaatataacttttttattttgaaaacccataggttgaagatgatataatcagagtaataataaggatgctccaagtatattaaacataagaatttggggtctttgttacggaaatagatttcctttttcctttctttagtcttactgttttaaggattttttttaaagtatgattttgatgcttccaaagtggttgctattttatttcaggtgggtcatttgatagtttgttgatgttttcaaggtctctaaacaaagtctgatgtgttaacagtcttattaacgatgttaaaatagaattaacagcttgtggatgcctccagagcacaatagcctgtcagcctcccctgcccccttataaattgtgcccctgctgtcatccctttgtttcaggcccaatcagcaaactaaacttttgtgaagagagaaggcagttcaagtgtttctgccgcagctgaagggaggagctaatgtggaatttattgggagaccaatcagtgctggagggaagaatgaccccaaattggaagaaggactttgttgacccccttggctccctgacctttccttgctattttgtccctttaaagaggtttactttggttgtcgtttactttgtgatgcttttagtaaaagccccagaagttttaaaagttttggatttaagatccctctcagcacagatttaattgtgccgtgtgattttgagtaacttgagtagatgttaacactcagaattattttttaaaaatctgacacaagctattaataattttttaaaggagtagaatttcattgattctcttgagccaaaatagattctaaatctcttctagtatctctttcctgtagttactttcatagagaatcagattagttactgatgttagactattggttctatttcgttgaatttatgctttaaaaaatagatttgtgtattccaaatctttaaaactttttttttttttttttttggtcaggcagtaattatagtgagtcagaaacaaatatttttagaggaaccctttttttttattagtattactagtaacaaatttgacaaattgtcacattttaaagtacagatttatgggatagcctgacaaatggataccacttttcctttgctactgtccaatttaataatttataaagtgtggcatatttgtaaaatagttacccattctcactgagcattacaccagttttggtaagggatactgagacattgttaagaattaagtattttttagattgcttgagcactttccttgttcccttatcagcattcttctcccttgtaatgtggtttgttgcttatatttactttgcaaccggccactgttcaaggacttcagacagtgctgaggtccgagatggtcactgctggtccaaagaacaaacatctcaggctagatgcaggacactaaatatgttcttcaagccaaggttaaataaaattactcaaatgtagccaaatacggggaatgagatgcagttaatgaattgtggctttgaaatatgatcatttgccaaggaatatgctgtgatgaaaacggagcagtgtaaactcagcacttctcttagctcgtagtgagctgctcaggtaaaccccgaggggaatactttcttctactgaataaaccctaaagataggcatccattgattgaacagtgtctgaaactggagcaaacagggcgccgtttgatactagccccatgtgtgggtataaataatgttttccagttggcatccttgagttgtgctgcttgaatagggccactttacgtggctgaagaagaatgtctctgcagtagttctccctgagcagtaactgcttggtacctttcacccacagcacccattgctgcccatccccatcccatgtctagtgtgccctcacattccactgctggtcagcagaaccatcttatcagaaagtgtcaccaagcccttttttggtgtgcccgctgaatgagcactccaggctgtggagttcgggacatgccttggtttgtggggaccatgctgcctgcctgtcgagaccaagcatcgatactgtgtgtctacctgatgaaagtgtccagtatgtgtctgcatgacttggggacactaagaaaaccaaagggattagcaacaaagagagcttgtcacctttgtgcggaagccagctggcatctcacagggacaacctacaacctgagctgctgcgtcctcactaaatctgggcccctagggaccccgttttactcctgctctcctggagcttattacgggcctggctaccaaagggaaagaggggaaaatagaccaggagccttatgctagaaccatttattttgtttcacgtgatgcagacagagataaaactgcaaatttaatgaaactttaacaatcagtacaatgtttctccttaagaactttgtaaatagcatttatctttcaagagttctttctctctttttgtgattattttataaacttaaaggaaaaagagaaaaagtcagtggttccagcatttgctttagtctgtgacttaaatggattataactcttgaccgctgacatttaccaagataaatcagtggtcatagatgtggagcttgatgtctcttcggctctgggaccaatccccttggacaaaagttttcctgtgttcttagtattctgaactggctacagcaactttaaggaaaataaaggttacaaaaaaagttctgacaatttgtttgcttttacattttcaaatttgtgaaatgtagagataattttgttttcaaatctttgtaattccctgaagcaaatactttcaagccagttgcaaaatgctgctttagaaataattcatataaacatgcttctctatttaatcacaaggggagatgtggagaatggatgttttattttttcagtagtttttgctctataaaaatattaaattgctattatgattactaaagatacctttgcgtagtactttataatttccatgtacttttataaacactattacatataatctttgaatgagttctgcaggaagatattattgtcctggttttgtaggtgaagaaacaataaatgcacacattcataacgtgcgacgtagtgccagctttgtattgccagaaaatcattttaagaaatagatttggtatgtaaaatggctagaaaacacaacacaaatttggaacgaagaagctgttttgattccacatgatctctataaaatatgaccaaaaaaaccgggaaaataaaatcatctgatcatgtgcaagtccttttttagtacacaattaggtgaatcttgtttttatgattgcttagttttcatgtttataaaataccataatatgccccataattatagcataataataaaataggaaaataacatcttccttttaatttttaagacaaattataatcacaatattatagcagaagaatgtttttcaattaaaaagtggtttggttaaaatatgattttttttcttctaaaaatcccaaaatggccaaaatatatttaaaaatatatttgttatatatatttttatttaaaaataattttttctcccacttgttaaagattaagtggcataagtatttgttttggggcaattcactgccgacattcagaaacagaactgtattattgggcacaggaaaatctgattagtgtttctaagaattagtatagcacagcaagacagggaagcagtccaaagtgctaaaggttaaaagcaatttataaaaactaggaaaagaccttacttgcttaaaaaaaaaatttcttaataattaaaattgtctaagtgatattcttgaatattttttgtaatagtttcatattattttcataaaaatactttggttgaggcagcagcagaggaggaagaattaatataaagaaaacaaattttcctattttgcaagatccaaaatcttatgaatatagtttttagtgaaaaaaattattaaacttttacacagtaaccctaagaaaagtctccacatatggtcccaaaggttaaaaaaaaaaacccaaaactcctctggggaaataatcatttcatgaaaagcagtctatttggaatttcactggagacactctgagaatcgaatcgagcttaatttctgtctttgtgataatcaaatatacattttgcattctagaagtttagaggaggtattatatgtccatggttttctttaaacaactctaacgtcaaaatggtcaaactgttggactgattcatgttagataaaacagatgggattctcagatcgtgcaccgttcagccgtttgatggaattcgcgccaccctgaccagcgagcccagatggcgcttaaatctgtcactctttaacgaccctactgttttttaaaaatatttttatatttgagctcattcagttaatctgagagattaatcttttccaagatatgtctggggagggctttactgagggtttcacttggaggagctcagggagagtaagaagaatgatgaggcctcttggacacaggactacttgctagaaggaacctggggaagaagggctggtggtccttgggctttggaatatttttgaggcaacaaggcccagaagtgcacgtgaagagtggtagtgacgggggttaagggaagaggggatggatggggagggcgtggtgcagggaggtggaggtgaacactgacatcgctgagacagtacagcccctgccaagaagcttagatctcagtaaggggccaagtgctgactgtgaccacacctgagtggctttaggcagcctgaccttcactgcatggggatgactcggtgggtgtgccccaggagcagagcccaagatgggctccaatgtgataagcctctgggatggctctggaaagaacctgttctgcaccacaactctcacaaatctcatggggtttttttccctgtaggttttttcccccctttcttaaattgttatttcgagccagtcagcctactgaaatgcttcagtcatttggggtgtaagatgttggccagctcccgaatctctaaccttggatacatttgcagagtggcttggaattgctttctattcctgctggggtaagaaagggaaaaatgaatgatttttcattatgcacacatggtattttttcccgcatttgaatcagatgtagcaggtgtcaaaatatggtacagaatttacagtattaatgtgaaaatttctactgtcccaaaaagccaccagagatggacaaacccacctatgttaacaaaagtaaaaatgccctgctgtctttaaagatgttcctggtggtatttgggctgctctgtgctagtttttctggggatcacgtgatgctgcctatacttgggggtcttgtggaaagcagtggatgcctctcaccctgcatagaagacgggtccaaatgtcttgtgcccacctgagtgtctacacactgaagacacgttagaggtctgctttagagaggttttcctcctaaattaaggatctatgactttcacatagacccaaaagtgagcagagatgcaagttgtgttgagaggttcttttggaagatgtggggctttgggggtcttggggactgggggactgtcagaagtcactgctctagtagaatgtggtgggaacttataacaacagattctccacagaaatgccacacgtaaccatcccttgaggatggagccacgtatgctgtaaacagagtggaagaacatcaagctcgtaacttgtcattttcatcataaatctgctgtaagcttgcaacagccacggtttccccctccccacccacatacacatagggacattatggaaaggattgcagtatagtcctacttaaagaatcttgctttttttttttttttttttttttagaaaataaacaattgctagaagagtggagagaccacttgcatctaactctgtggcaggtttaggattctgtgtaatcagtaagacagagagggaatgtgtcaactggcctcaatttcctagtagttttgggtgtttacagagtacaattgaacattttaagggaagcaacttgtggtgcctgcattgaaaatcattttgatgaagttatggaatacatttgatattatctaaaaaacaaatctcctacttttttgactcagatatttctagtagtcaaaataaacattcgctcttaaattttactagtcaactcatttcacattcacctgattccctctaaaaacaaaaatctttctactattccaattggcaaatggtctgttttggaacaaaaggatagatgcatttgaagaattctctggtcacctgagaaatgaaggtttgcccatcattttttattaatgcttgccaagtaattaggtatgaaaagatgaggagcaaaaataaatcttcatcttcaatagaacattagaggctgggcatggtggctcacacctgtaattccagcactttaggaggccgaggtgggaggattgattgaggtcagaagttcgagaacagcctgggcaacatggtgaaaccctgtctctacataaaatacaacaaatagccatacatggtggcacatgcctgtagtcccagctacgtgggaggctggggtgggaggatcgtttgagcccaggaggcagaggttgcagtgatccaagatcatgccactgcactccagcctgggcgacagagtgagcccttgtcttaaaaaaaaaaaatctttaatagaacactggcggccgggcatggtagctcacgcctgtaatcccagcactgggaggccaaggcaggtggatcacctgaggccaggagttcgagaccagcctgaccaacatggtgaaaccccatctctattaaaaatacgaaaattagctgggtgagatggcagttgcctgtgaatcccagctactcgggaggctgaggcaggagaatcacttgaacctgggaggcggaggttgcagtgagctgagattatgccactgcactccagcctgggagacagagcgaaactccatctcaaaaaaaaaaaaaagaaaaaaagaatattggctatttgagcaagatgaatgtattttggtagatagaagaaaaatgagaactatcgctcatcactgctgatgtctaaatcccctccctgggcatgaggatggtacaatgacacagcaaccccagcctgccgggcttctgggatgccaagctgggggtgtcctggccaggtccaaggtgctggaagccaatccagaaaataggatgaagggataaaatcacactccaaggccgtgatatgattgaatcaaggtgttaatctaggtgaagagtgcagaagccagattcactaggggctccagggcaggacaagctggttcagcggggagaaggcaggaggcagatgcccaagaagtgtgggcagatctaggggtgactttataggccctcagcttttttttttttttgagatggagttttgctctgtcaccaggctggagtgcagtggcgcgatctcggctcactgcaacctctgcctcccaggttcaagcgattctcctgcctcagcttcccaagtagctggaactacaggcatgtgccaccatgcccagctaatttttttgtatttttagtatagaagggattttaccacgttgaccaggatgctctcgagctctcaacctcatgatctgcccgcctcagcctcctaaagtgctgggattacaggtgtgagctgccgcgcccggccaggtccttagctttgaatggggagtgaggcattaggggcatggagacacgtgaagaacatgtagcttgtcctttcttccttccagagctttctctagccatttgcaaaaattccacaagcacattatgcagtcatttttctaggaactggagagaggggagaggtggatgggaggggagggtgtcataagccttgaaaaagttagatattccaaagaaccttagcttttcccaaataggaaatggagagttgggtggtagtttcaaatcattatttcattttctttacctctgaaaagatttcttagtttactgagagcctaccttcaattgcatggatgttgtacattttctttttcatttcccatgaagatccctatttttagcttttaagagctgttactcacaactgagatacaaacagtgttctgcaccccacacagcatatatctcatgattagtgacagggttcctagaactgcaagacaagtttgggcttactcaatctgttaagtttccttataggcatattttttcattctattgttttagcaaggggcctattagaaatttccatgtgtataaatgacactttaaagagctgggtgcaggctgggcgccatggcttacgcctgtaatcccagcattttggaaggccgaggcaggcagatcatttgaagtcaggtgttcgagaccagcctggccaacatagtgaaaccccgtctctattaaaaaaaaaaaaatgaaaattagccaggcatggtggcatgcacctgtagtcccagctactcaagaggctgaggtatgagaattgcttgaacctgggaggcggaggttgcagtgagctaagatcgtgccactgcactccagcctgggtgacagagcaaaactccatcttaaaaaaaaaagagctaggtgcagtggtgcatgcctatagtcccagctacttgggagactgaggtgggaggatcacttgagcccaggagtttgaggctatagtgagctatgattgcgtctgtgaatagccactgcggtccagcctgagcaaagtagcgagaccctgtctctaaaaaagtaaaaattaaatttaagaagttcttcaccatccaagttatgttacgtggaatttcccgtggcagtttcctgaaacataacttgtttatgtttcctgaaacaaaacttacctgcagtttctagacacgtgctctaaaaacaggcatctactggcctgttttaggatttagaaatctctgctctgcccttctttcaactatccaaatgaaaagaatgttttaacatttcatatttgtgaaagtttcctcaattactgacttttttcagttttacaatttgtttttggccaaaacaacagcaacaacaaaaatacgatttaactgcaaaattgaccccctgatcttagctacaccttccgtggtccttttctaccattcagcttgaccctccacccatgggaggtctctgctcattgggaatactgggccatgaaacatctcaatattttccatggtctttactttatgcttgctcctcttctgttcttcatacagcaagccagagaatcagatcatgtcacttccctgcatatctttcaaaacatcccattgaacttagaatacaatccctcctccttactgtggccaccaaagccctgcattgctggctcctgctgacctctccagcaacatcttatgccactctctcccttgtccgctgcccttatgacacaccggtctcctttcagtgcctgcggtatacagcgagctagttcctgcctcagggttgttgcactagctggttctgctgccagattctttctgtagctggctccttgtcctcttgaggccctaaagccttccctaccatcctattttaggactcttatcctcaaccccctgccatgattctctctcacagcatcctgtttctttccttcatggcatttatcacagtctgtcaatttttgttttttgttttctcgtataatgtttgtcttccctactgcaggccaaagagtttgagctgagcagggagttgctactgaaagtgtttgatcaggggagggtatgattgcactttaaggagattgatctatagccatggacaaaatagatttaagtgcttggtgaaggcaagggagagactgaaacagaaaagctaagaatagaaaactactgtaggctgggcacgatggctcacacctgtaaccccagcactttgggaggccgaggtgggcagatcacttgaggtcaggagtttgagaccggcctggccaaaatggtgaaacctcacctctactaaaaatacaaaaattagccaggtgtgatggtgcgtgcctgtaatcccagctactcgggagactgaggcaggagaatcacttgaacctaagaggcagaggttgcagtgagccaagatcacgccactgtactccagcttgggtgacacagcaagactctttctcaaaaaaaaaaaaaaaataataaaagctactgcaaaagtcctcctagtaggtgacagggactcaaactggtaggtgagaagggatgtgtgagagactgcccttgtgcctggactcacgtccctgacttgtgcacctccctcccaagcacacagtccccttctcacatcctcgccctcactccacccttcaccgtctccttttgggtgtcacctctgaggcaggcactacaggccttctgggtgattcttgagtgatgggtatgtctcacatctttttgttgatgatacagttcctttatacagagctgtattgttattagctgtcgtccctcttgttagagcccttctcaaggaagaataaatacactgtaggtgactaggtgactcctggaatcttttcttcgggaatttctttttttttttcttttttttttttttgagacagagtcccactctgttacccaggctggagtgccagagtgcagtgttgcagtcatagctcactgcgaccacaaactcctgggctcaagtgatcctcccacttcagcctccagagtagctgagacaacaggcatgcactactgtgcctagctgcctatcagtttttctttactgggtaagtataaatatctaaacatccacaagacatggaattgagagtctcttttctctgtcacctagtgtatttcaggtctataataaatattatacagggctgggtgtggtggctcacaccgataattccagcactttgggaggcttcagcaagtggatcgcttgagcccaagagtttgagaccagcctgggcaacatggtgaaaccccatctctaccaaaaaaaaaaaaaagttagccaggcgtggtggtgtgtgcctatagtcccagcttcttgggaggtgtgaggatcacttgagcccaggaggttgaggctgtagtgagctgtgattgtaccaccacactccagcctgggcaacagagcaagaccctgtctcaaaaaatatatattaaacagcaacaataacattttacctcatttttctccactgttcattttgtttgaaaatctgtgtggcaaaactctatgcccttaacccttaaagttgccattagccagatgatggcaggggaagggcgcatgggatcttcagcagtccttcatccatgcgcccaatgggtattgaggagccaccatgttcagggcactggggagatccatccatgaacagaaccaaaatctgcccccctagagcttacaattcagcaggctgatggtaacaacagagataaataagttggtcatggagaattttagaaagtgtccagtgtcatggtgcaacagaaaaggtgcaacaggggccaggcatggtagcttagcctgtaatcccagcactttgagaggctgaggtaggcagatcacctgaggtcaggagttcaagaccagcctggccaacatggtgaaaccctgtttctattaaaaatacaaaaattagccgggcatggtggcgcacacctgtaatcccagctactcagaaggctgaggcaggagaatcacttgaacccgggaggcagaggttgcagtaaggtgagatagcaccactgcactctagcctgggcgacagagcgagactccgtctcaaaaaaaaaaaaagaaatggtgcgacaggggcaaaggaaatgaggggaggcaggatgctattttaaatagggggtaaggataagccccattgagaaggtaatatctgagcaaaagtttgaaggagaggaaggacttagccttgaatacttttgaggaagaatggtctaggtagagcagccctgtgtgtccgtggttagcagggagggctgtgggctggtgtgaagtgagaggggtccacagcaatggaggtgagaccagagggggaaccagaggccagatcgctggaaggatgttggctttactccaggtggaatgaggagccattgcagagtttttaaacagatccctccagaagttatgttgagaataccatgtaggagacgagggttgaagtggggagacccgtcaggagatagttgctgtgagacaggtgagagctgctggtgtctcaaactgagtgagatgtacctgggatatgtttcgaagcagaatcaatgagatttcctggtgggttgagtgtttctcagttggaaataaaagaggagtcaaggatgactgtcaaggtttttggtttgtgtgactggagggaaagagtggctttcaaaatgggtttggcaataaatggagcacgcttttgttggggtaggggtggaggtcaagagttcagctttggacatgttgaatttaagatagctactagaattcgtttttttttagctactagaattctttttttttttttttttttttttttttgagatggagtcttgctctgtcacccaggctggagtgcaatggtgtggtcttggctcaccgcaacctccgcctcgcaggttcaagcgattctcctgccttagtctcctgagtagctgggattacaggcacgtgccaccatgcctggctaatttttgtatttttaataaagacaggggttcaccatgttggccaggctggtctcgaactcctgacctcgtgatctgcccatctcggcctcccaaagtgctgggattacaggcgtgagccaccatgcccagctgatagctactagaattctaagtggaggtatgaagtaggcagttttggggagagaggctgggtctggagatgtacgtgtgggagctgttagcagagaaatggtatttaaagtctgggtggggtgacttaggaatggacacagagctgactgagcagtcacaccccgtttccccacgaagacctcagcccaaggcaaccactaatctattttctgtcttaatgttggacactccaacattaagggatgcgtaagaagaagtggagggggaaccagcaaaggagatggagaagtcatgagcagtaagataggatgattaccaaggagtatatgtcctgggaaccaagtgaaaacagtacagcaagttgggagggggtgattgcaccagatgttgctgccactgggtcagataattaggaaaccaagaatcgactattgaaagctggatgcaatggtgcttgtctataattccagccactcaggagactgagatgcaaggatggcatgagcccaggagttcgaggctgcagagaacaatgatcgctcctgtgaatagctgctgcattccagtctgggcaacatagccagaccagaccctgtctcttaaaaaaacaaaaattgggctattggatttagccacgtgggggtcatgggtgaccttgacaagagcagatttggtagaagcatggaatggatttttcctaatattcctcctcttcaggggcagacaatatttaaatgaaaccgtatttggagcactcatcaggctttaatattgatgctgcatcttctactgtcacatacataaaggggaccaggaccactgcattacagatgtgactatttctaccttatatatgtatgccctatatgtgtatatactttatgtgtctatatcagctttattgagatataatttacatctcatacagttcacctatttaaagtatacagttcaatgaatttaatggtttttagtctattcagtgttatgcaaccatcaccatgattaattttatttctatcactgtttcttcagccccaaaagaaaccctgttcccattagcagtcactcctccttttcccccaaaaccctcagtcctaggcaaccactagtctactttctgtctttctatatttgccgattctggactcttcatatacatggaatcatacgatacgtggtcttttgtgactggcttctttcacttagtataatgttttcaagcttcatccaagctgtagcatgtggcagtacttcattcctttttagggccaaataatattccactgtatgtactaatatataccacattttatttattcattgattagttgttggaaatttaggttgtttctactttttagctattatgaataatgctgctatgaacatttctgtacacattgttgtatgggtatatttcttctggggttatacttaggaatggaattagaatgcagtagcatgatctcagctcactgcaacctccacctcccgggttcaagttgttcttgtgcctcagccccccaagtagctgggatcacaggcactgtgcctccacgcctggctaattttttgtatttttagtagagatagagtttcattatgttggccatgctggtctcgaactcctaccctcaggtgatctgcccgcctcggcctcccatggtgctgggattacaggcgtgagccaccacccctggccacagactggcttccttccttccctccgtccgtccttccttccttccttccttccttccttccttccttccttccttccttcctttcctccctttctttttctttttctatttctctttctctctctctttcttccctcctctcccctcccctcctgtcctcttctctctttctgacagagtttcactcttgtcacccaggctggagtgcaatggcgcaatctcggctcactgcagcctccacctcatttgttctcatgtcttagccactcgagtagctgggattacaggcacctgccaccaggcctggctaattgtttttttagtagagacaggatttcgccatgttggccaggctggtctcaaactcctgacctcaagtcacctcagcctcccaaagtgctgggattacaggcatgagccaccacacccagccttcttcattctttttttttttgaggtggagttttgctcttgttgcccaggctggagtgcaatggcacaatctcgacttactgcaacctgcacctcccaggttcaagcgattctcctgcctcagcctcccgagtagctggcattacaggcatgccccaccactgggtgaaaaatgcccagctaattttgtatttttagtagagatggggtttctccatgttggtcaggctggtctcgaactctcgacctcaggtgatctgcccacctcagcctcccagagtgctgggattacaggcatgagccactgcgctcggcccatcattcttaataatattcccaaatggtgtatagataaatactgccacaatttcaggactagaggttaaaaaaaaaaaaaggacaaagttggacagtagagctgagagcacaaattgtcccctttttttcccaggtccttaggttcgtagacctgtgtcagccataattactgctgaatgtgactcctgtgtatacggtcatttttattttttctgttcctggaggtaatgcaataagtcacctcaaaaagggcagagaatgagggagagaatctacctgcattggcgtattgaaaagatcagattatttcagaatccagatcattgtttacttttagctgcataaaaatatccaagtagattttcttataacctctccaagataaagatgccagaaacggcagccaaatacattgactttgagagaggaaaaaaaaaaagcttgtaattgccgatcactccttagatttacttctggggagcatcaattaaaaatctcaaaacacgtggctttttcagtaaaattatattaatatggaggaagagtttttattaaatatgagtgcacgtgtgtctgtgtctgtgtgtgttttaaacgtttccataatgagttcccaagtgcttttttggcagtagttattaaagcttgtgtgtttgcgatttatctggcaaaatgcctttagtgaagaaaggatatagtgttctcttggttctttgcccaaagtaattttggagaaatctgtgactgtatttagttcatgtcattcattggagacaagtcattgtaattacatttgatcacaatcagtttacagttgttttatcatgttttcatgctgaatatctactcagacatcatagcaaaatttaatggctactgttttatttgtacataaaaagatttatagcccttttttgcagtacacatcgggtttcaatcatcactgctacagagtgagaggaaagctatggataaagaactatcagaaatccttgactacataaaattttatttcaggtcaccttgccataaaagatattgaatgtattttgtggcttttcctcctgacatgctaaccgttgtagaagagttgcaatatttggaggaaaccgtatgaaatgtggaacttaattcacttaagatggtttacatttgcgcgtgttttccactggaaatagccatgccagccttatgaatggcccctgggtaatgcagagtaaaaggcaatggcattaccgatattgttgagttttaaaaggaagttgtcttcttaaccatacggctgaacattttgtcattgttgtttcagaaggtctgctctaacatctgcactgcggcagagttgtgttacagggtgttatttacagctgccaaatgctggaggctctcatgtatcagacagtctctgatttgctaattgtggaagccttgattcaccagtgaatttgggtaaattcactagttatctcctaagtgtcacttctcaccatgccttatttttcccaaaaggttgattccaagctctgctgaaatctgctcttggtctatatgtttgagtctacattgttgaagaagctccctttagaaaagtgtaattaatgggaaactttgacatccagctgagaaaattagtttgcatcaaaaaaggcaagatagaggattaaagaaattttagtcctaatctaattaacaccaattaaaagatgcagatgaatttacaccaacaaattgttaattatgcaccaatttgccttttttctgcaaccaaactgaaatcaggaaagtattattatcttttttgtttgaggagacttacattgtgggtttgttacaatcatcttttatataattaaaaggtaggcagaaagagcgtgaaatatttcagtctcctgacattttaatttaggttaactctttaaaaatacaaagtacagaaaaaaaaaattccagaaagtacaggataattctattagcatttattcactgactagatatttattgaggacctagtatgtgctggacacttaggtaaccattgtttctctcactcaaaatattttaacttgtttgtatttctaatatattgctcattagaaaaattgtatacgccaggcgtggaggctcatgtctgtaatcccagcattttgggaggccgaggcgggcagatcacgaggtcaggagattgagatcatcctggctaacacggtgaaaccctgtctctactaaaaatacaaaaaattagccgggtgtggtggcgggcgcctgtggtcccagctacttgggaggctgaggcaggagaatggcgtgaacccgggaggtggaggttgcagtaagccaagattgcgccacagcactccagcctgggcgacagagcgagactccgactcaaaaaaaaaaaaaaagaaaagaaaaagaaaaatagtataagctaattgtaccaaaattgtataagctaattaaattctgccctggatacatgtcagaaaaggagaatcgaaattttgggcctcaagaaatgctcttaatgtcccagaactcctctttaatgtgaccttttagggtattcagcgtccatcttcctcacccggggaatctgtgtttgtttcccagtgttactcagatctccactgtgctgggactttctttttccttgtgaatcactcttacagctcctcagatggtgatctgagtaattatgtagagggtggtgaagcacagaccttttagatctgcaaatgacacatctgtccaaatgtcatgtaatgagtaaccacaatccactttatataagccatatttcttctctttccaaaatgggaaggagagggtggggggggaaatgtctggtagaaatgggaagaaaagcatttctatggattcctctagccattaattacatagaaaatgccacagctgccctcagatttccaggtgcacgttattaaacgtcattcaaaggaaatgtttggccaactagatcctgatgtgagaaacagcatcctaaagagctatgtatgttactgtctaatgcatgtacttaggcattaaataatattaaatgaccatattaccttcttggggcaatagttaatataaacatttaggatgctcagtttgtacttttcagtatttgtgctggaaacttttgcattcacaactttgaaaactggctcgtgttttcatgggaagtgtcagtttaaagttggcctactaattaatgggggaatttcaatatggcagtgcctatgacagcaaatgaaaagcattctttataaacatcgtcttcctccacacattcacaggttagtatctgacacccatttttaatttctagagcaccatttgtacttctctgtggttttgcctgcaagtcttcgatgatgcagtccacccttccataaaaacgtactccaattttcctagattctactttcattgttttgtgaatcaagttagaaggtacataacttagcctgatgagatggcattcataaggttaggatagcagagttgcctaactaatcttcctgttgcaatgaaataaaagaatgatatctaagttgaccaaccttgtaaaaggtaattttacaagaggcctccaaaaataacggactaggactggccagagaagaaaataaacccctcatcctcaatccagaacccagagtttgtcatcactagtcgaaaagcttgtttgttttatacctaagtgagaccttgagttatccaatgtgcttccatcacagaatggcccaccagggtagaaggattctgagtgtattccctgatgctgttgccatgtgcctatggaatacctatgctccatatttagccctctttctgtgtagtagcagagacgtggatggctgctgaaactaagggcccagtctttggccttaggacagaccactgggtttctcccactgcctaaaaccttagtagcattagcatcagacatggacccaataaacaaactacctagttgataagcgccgcatttttcatgatgttttactgtggcctatccacacactctttcctattccatgaaaggaagaaaaagataatttgagttgtcctataaattaaaatttttcctttgtgattattttggaccagcgccataacattcagaagattatgagtggagtctttagtctgtgaacaaagtcctaagaaggaagtagtgctgtaacttacttcatctaaagaagcatcatcgctgaatgtaaagagtgattctggattggatcttaagccggaaaaataaatggagataaagtacgttattgggataatttgtgatatttaaataaggcctgtagaatagatactagtatcgtacccatgttacattttctgatttggataattgcaataaagttgtgtaggagagtgtccttggtttggggaaccatttaagagtataggggcacaatgaatataacttacagatggttcacggaaaaaatacaggtgcatactatataaaaataaatttatatctgcatatattatgcatatctacctatctatatctgtatttatacatatggagagagagagaccaagagagacagagagagcagtaatgataaagaaatgtggcagaatgttagtgctaacagttggtaagactgggtaaggagaattcaggaattatttagctatccttgcatttttatttttattttttttgagacagagtctcccactgtcacccaggctagagttcagtggcacggtctcggctcattgcaacctccaccttccgggttcaagcgattctcctgcctcagcctcctgagtagctggggttacaggcatgtgccacgacgcctggttactttttgtatttttagcagagacggggtttcaccagttggccaggctggtctcaaattcctgacctcaagtgatccacctgtctcggccccccacagtgccaggattacaggtgtgagccaccactccctgcctccttgcatcttttctgttagtttcagattacagtcatgtgtcacttaacaatgagaatacgtcttgagaaatgcatccttaggcaatttcatcgttgtgctaccatcacagaatgtatttccacaaacctagatgttacaacctaccgcacacctaggctgtgtggtatggcttattgcccctctgacataaacctacacaacatgtagctactgaatactgtaggcaattgtaacacagtggtaaggatttcttttcttttctttttttttttggagacagagtctcgctctgtcgcccaggctggaatgcagtggcgcagtctcggctcactgcgtcctccacctcctgggttcaagtgattctcctgcctcagcctcctgagtagctgggactacatgcgcctgccaccatgcctgactaatgtttgtatttttagtagagatggggttccaacatattggccaggctggtttcgaactccagaccttgtggtctgcccaccttggcctcccaaagtgctgggataacaggagtgagccaccgcgcccagccaggggtaaggatttctatatctaaacatatatgaacagaaaaagggtacagtaaaaatactgcataaaagatttaaaatggaacactcacagaaggctcttaccatgaatggagcttgcaggacctcatgttgttctgggtgagtcagtgagtgagcagtgagtgaatatgaaggcctaggacattactgtcactactgtagactttgtaaacactatatacttagactatactacatttattaaaaaaaacaaaaaacttttcttcagtagtaaattaaccttagcttactataacattttttttttcttttgaaacggagtctcattctgtcacccaggctggagtacagtggcgtgatcttggctcactgcaatctcagcctcccgagttcaagtgattcttctgtctcagcctcctgagtagctggcactacaggcacctgtcaccacgcccggctaatttttgtattttcagtagagacgggggtttcgccatgttggccaggctggtctcgaactcctgacctcaggtgattcacccacctcgccctcccaaagtgctgggattacaggtgtgagtcaccacacctggcccaactttttactttataaactttatatatatatatatgttttgttttgttttgtttgtttttgagatggagtcttgctctgtcacccaggctggagtgcagtggcacaatctcagctcactgcaacctctgcctcccacgttcaagcaattctcctgcctcagcctcccaagtggctgggcttgcaggtgcccccccctacaccaggctaatttttgtgtttttagtagagacatggtttcaccattttggccaggctggtctcgaactcctgaccttgtgatccgctcacctcagcctcccaaagtgctaggattacaggtttgagccatcacgcctagcctgtaaactttgtttatatttttaactttatgactcttttatagtaacagtaagtttaaaacacacattgtacaaaaatatttcctttatctcttattctatatgcttttttatatttttaatttttattttttatactttttgaactttttgttaaaagcaaaaacacaaacacatacattagcctaggcctacacagggtcaggatcatcaatattactgtcttccacctctacagcttgtcccagtggaaggtctttaggggcaataacacgcacagagctgttgtctcctgtgataacaatgccttcttctggaatgcctcctcaaggacccacatgagtctattttacagttaactttttttttttttaataaggaggcgtatagtctaaaatgaagataaaatgtaaagcataatataaaaccagtaacatttattattatcaagtattatgtactgtgcatggttgtattgctatatatatataaaattttttttttttttgagacagagtctcactctgtcacccaggctggagagcagtggcacaatctcggctcactgcaagctccacctcccaggttcatgccattctcctgcctcagcctcctgagtagctgggattacaggcgcatgccaccatgcctggctaattttttttttttttttttgtatttttaatagagacgacgtttcaccatgttgaccaggctggtcttgaactcctgaccttatgatctgcccacctcggcctcccaaagtgctatgattacagatgtgagccaccgggcctggcatgtttgattttttttttttttttttttgagacagattctctttctgttgcctaggctggagggcagtggcgcgatctgcaacctctgtctctcaggtttgagcaattctcgtgcctcagcctcccaaatagctgggattacaggtgcgtgccaccacacccagtttatttttgtatttttagccaccgggcccggcccagtataatcttatgggagcactgtggtatatttggtctgttgttgacctgaaagttatgtggcgcatgactgtatctaaaaacaaacaaacaaaaaatttaaatagaaaagctggattccgaccacatgaatgaaccttcttatgattctggaaggaaggcaggttctactaagacagggttcttaggctactaccactacctcacccataaaggatcagccttcttaacccagccagtcacaagggattctgaggatgaatgttcaccagggcagattggttatgttcaacagcttcatgtatttctgcaaaatctaccagtccgatgatgcagtgaacataatgatcccctgtgaaataataacaagataaaatgttcccaggcccatttgtttcccactgctaccaccccataagactgaaccatgggttggagtgaacacttgaaccaaaggttactgtattgtatgttcctgttcacacaggacttcacaaaaaccttcttttataaagaaaacaaccagccaataaaacagcattagagtacattatatatgtgaccaattgtttgataaaatctgatgtaagccttcaggcgtaattggagttcttagcaaaatactttggtttttaatatttctatgaccctctaagggggacttagcaattactcttaaattttcaaagtggtgcatggagttttagctgtgtgacttccattaaagtccataggagtcttgttgctaaaacatcacacaactcacgaaaatgtgccccttcttgtgaaattgttagaagtaatgggtatggaagtatagcacagcatttctggtacatttacaagctttctgtacttgtttcaaactttatacctttatgaaaactcaatagttctacaaaaattgaaggggggaaaaagcctattatgtgtattccagaagtgaagggtagaaaaaatacagtagaactaataaaaaattaaaataattcttcaagaaaagccaatgtttcaacatatttataatctttatttcaaaattaatatatcctctcctgggtttttaaagtaagccttaaaatcgaacttaaaaaaatgaacttgactgacaaagtttcactataaccacatacaatgattttgggtttcagcaacctcctctactgaaaccgatataatttaagcatcatcggagcaaaacttcactcctttagatggttggtggtgtgaggggtttgttcccagtggataagaggatggccttaaggtttgctgagtccttctctctcaagaacctcttagaggccgggcacggtggctcaagcctgtaatcccagcactttgggaggccaaggtgggtggatcacttgaggtcaggagttcgagaccagcctggccaacatggtgaaaccccgcctctactaaaaatacaaaaattagctgggtttggtggtgtgtgcctgtaatctcagctactcgggtggctgaggaacgagaatcgcttgaacccgggaggtggaggttgcagtgagcggagattgcgccattgcactccagcctgggcgacagaacaagaccctgtttcaaaaaaaagaaaaagaatctcatagacatttttctcctgcgtccctgtgataagagtgctgtgattcctgctatacagtcaaacagattcagagcccacctttgactccaggaccaaatttccccctttattctcttttgtgctatgctggagaagacagtgtggcagttcccgggaatttgtgtggagctgtttcagggacactctgagctaagaaaagggtgagagccctgggaggagaccttctttcaatccaggctacatgctctgagtttttccagggcatatatagctgctccatttggactatgctcctagactgacatgggcctgactcgcaggagccggcagctcctagtgctgagctcaccggctcggcccagcaccagcaccacctcccctctgagcatctggtggccttgctgataacacagtgacacagccatttccttctatagcagaaacatctttggagttctgtttccacagtcctttgagagacactctcgaggccaggagctggcctcagacataaaagtatttgtttcaacagagagagagagagagagagagagactcagtgactgctttttgagtgaattgttgttggctcagtttcagtaatgcaatgttttgctttagattaatttactaagcagtactaaagtatcatttatatacattattgaatcttgggatgattctgtaagcattactttctcctgaaatctccacttctgtctggatagtggattttaggataggtttttaaaatggaaaacttgacgcagattcaaattttcaacacagcattgaacgaatagcatcagttggggacgagctatgccaccaatttaaagtgtctcagccggggtcagaattaggaactgtctaaacagggaatttcagaagggcaggggaggatatcaaggcacaaatgggaggaaataagccattgttcctttagaaagcttagtaacctcgataatgagaggctatgaaatagttctttttataactgtaacttcttaacttcccagccctaatagctccaagggtcacttgcagagagctccggggctacacctgccttgcatagattagggcccgctgcagctgtcttcatttgcaagactaaggtgtagctccaagaggctgtaggtctcagcatggagcactcctcctcaatctcaataggctggtgttgcggattaagatggccattgcaagccaggctcagaaattgcaagatgaggcaggtaacgatttcctgggttttatgtatcaggccttatgaggtatgaagcgggaaaccttttatatgcctgccttgaattagccataccttttacaatcagctctgttgaagagcagctgcctggactatctagcatacccatgggccaggcatgcctttggcacacacacaggtttgtaaagagcttgtgaatctataggatgatctcttggtgaggacagaagggacccatagctagtcagcatcggactgagggctggatccactttttcctgtaatgtgcgtttgtttcacagaaaatacaattaggataattcttgtgtgttctctacaggaaggaagtagtatactgcttgtgaatggtaggctaaatgagggaaccattaaagggtttttaatagacttttgaaccaaaagacataagggactatacttacattgccttaactgagaaatgttttgcagtgtgagaagacttaatcaaatcttcattacatacctggtcagggaccaggctgaatgtttctttaagcaattggataaaatgcacattgaagacttgttagttatgtgagaatatgtctgacatgcttatcatctctcctgcgggtgcctgagtatcagatacttggtttactgtgttgggttgaatgcttctgttctaatttctaatgaactttaccaccagactacttgatcatgactaagcccaggaacaatgcaaatggaattgccccctgatggggaggaatgggcccagatggcccttaaaaggtgataattaggaaatatagcatatctgagtagctagaaagagagaaacttgttaaagacagtcaatctgtttgaagcaacggtctttcccttaattatatgcattttcatttagagttgctttaaagtaaaatttttcccaggaaaaatttttattagtagtgaaaacctagaaaccacacacattttttgctactctgtttcagattattgaaaattccttccttcatacatttttttttggtttccagatctgtgtaacagactcgctgtgtgtgttttaggggccgttttaggttattttagctcttatgctaaaacagtgggggagcgattaaaagtgagaaaaatattagtatatatttgtaaactgagcttttaaaattaaaatagttgcaggatattacagtctgtgatttcatatactttgtaagattgccttaaatgtattgccttcttggcagcataatgccagatttttctccaatatgtcattaaaataattttacatataacaagttgaactttttaaagacttatattttaatctgaattagcatatttactaattatattacttatttggcttttctttagtccgattctttttttttttttagtgtacaaacttggcattactctttaagaataacaagtgaactggaaatgagagggtggtgacatgaagagagagagaagaaatacattccttatatctcttccagctcctgcatggaatggaggatctgacagtggccgttcctgggtattaaagccagtgcaaaagatagagcgtccaaaaggcaacttcttccttatttgtgaagtcagaaagtaaaatttacattgaagtgctaagctacattattctgaatattttggcagtcatatttgggcagatgagttgctttcctgaaattactcagcaccgtcattcatcctgacaaaagctagtggtacagatgcacctttgggactgaggccaaggtgaaacctgcgttttccaggtctgcccactcagttttggaaggactctcaataaaaccggcctcacaccccaagcatcacccctcctgtccttagtaagtacactctggctggaatctagggtcccagcatctagcccttgggacttcacataaattcatcaagtatcttcctccactcaaaaatctcttacagaatctttgacattttaagcttcattactgcaaagtggatatagttcattctcagcttcaggattccagaagcatacataccaggtcagaatggagaggcatcacgctttccttcagcaagcttcaggggagacaggatttagggtgggctacacatataccagttgtaggatgttttgaactatattcttgcaatcacagacaggttgtcccagagaaaataatctggctctaacttctcttgttatcagtgaaaagcaaaaattacttagtgcaggtatgcttaaaggaagaaaaaggcaagagaaaagtgagaggtaaaaattattaccattttaattccatgattctcagcaatgaaggagcatgattgaaatcccatgtgcccagtcatatctgtaaatgagagtatgatttttgaagactgtattcaattgtttcaacttgagcaattgcaagtaagacttaggactgtgtttaccagttactgttatttactattactttctaaatgtgacctgacttgaaacctttatagatgcaatttttatccatcacagaacaagctctaaagaggagagcagcttcaactttttcaagtattttttttaaaaggatttaactttgaccaacaccaaacttgcatcttgttaaggtaactaataactgactgctataacaatatttagaattttgtttaacagcaactgtcaaaaaaacaagttaaaatagcccaggagatggatggcgattaactctgcgttctttttagactgtgttattaattagctctctagactcaaataggttacatcctctgagcagtaaattgcatgccatttgcaagctctgtggatgaaatttacatgtggcctaaatgctatccacattgttttgttaagtagcattttatctctctggactggtcccttgcctcctcccccagccccagtggaaagttttattcacttttcttgcgggaagggaaagtcgcatgtagtttggtcatttggcgccatcttcttttttattgttaaatccactaaaggcagtcatgcctggcagtaccaggcgggctccttccggggttctggtcggctaagcattcagagttctttgctttttatttactagaaatgttttcagcttctgtctttgctttaagatctgattaaaaggaaccttaaaaaaggaacatagattttggtgtatgtttttcctctctacttctcttccctgtgccccccaaacccaatcaccaacttcccccatccccagcaaacacgggcttttttgtgtatttatttaaaagcattttaggaagcaccgtaataccgcacagcttggaggttaagatagaattggatgtttccctcaccatcagttgatggaatcatcagtgttccggttctatttatcttcatgatttgagaatgtttctgaacagctgcccttccgaggatgctggtatttagacagaccttcctgtcatttatctgactcacaggcacaactcttttgaaagaattaatatcaaacttacatatgaaaatctaccatttagaaatggattctttttcagtacctacttttcaattcaaccggggagatcccatctattttaaaaaatcattaatcacatacttctgacattttccctttcagtttcctcagggggaaaaaagttatttgaataacaaacaaacaaacaaaaacccctcatcgcaaatagctgtcagcctcctatgtgaacaaaagcgctctctcacactgagacctaccgtgttttgtttagttagaggcagcagggtggtagggacactatgcagaaaggcttgggttaatgagcactttctggattgagtgtctctcctgattaacccttggattacttgctttgagttgctaaccctctctcactgcccactcaagaatttcccacatggtagcctcatccatagatgcccttccctagatgcactgatggtagacagcataaaaatgtgtaagcactgtagctttccaatgaactgaaacaaaaagcttaagcattactttttatttccttgatctaaagaacatgttttgggggatattttcttaatcaatatctaagttatctagagttataaatactataaataaattagttacaaactaatttttagacacaagtcttttgttcaaaccaactcttacatagaaactctaaaaatttgggggggaaggggacagttggggatcagaatcactccccattatctctctgttggtgctccccaaaggatcttcagggaacgacgtttaaaaaccattttgtatcatgaaatgggacccgaaagacattctttctagtgactttgtgttagattgagtcatatgaaattgccactgtgtgacccattttgacctaaaaaaaaaaccaaaaaacaaaaaacaaaaaaccagcactagggtaccagagtatttttagtgtaatcactgtacgtgataagaaaatggagaaatgagaaagcttgaaacttagactataagctcctcataagctaatagcgacttcctcccttcttccgcagtcacctggcaagtcccttctatgtgctgctggttctagggatacagagataaaaggcgtagtcactgcctccaaatcatcacagtgcaaaggacaaataaatacagaaggacccatgggatgaagaaacagcccagggtggtgggaacacagagcgagagtttctaggatcttgaaagccatgttgcacggagctcccggtccctgagttttcagactgatctttctgtggactgtgcctaagtaataacagtttcagaacgtagaaactcagtgtacatccttcatagccaggatggatatgatagcctggaagtgaacagtaaatccagtgatttgttttcttcactcattctttcattttaagaaagtgcttagaatccacaagttgtgcttaatgccagcagacgcattacatatgccagccctgccccttagtcacaattactccccacactgacctcccattgcatttaaaaattgtcgctttattgagacatagttcagctctcataaagttcacatttgttttttttgtttttttttttttgtttgtttttttgagacagtcttgctcagtcacccaggctggagtgcagtggcatgatctcggctcactgcaagctccgcctcccgggttcacgccattccccggcctcagcctccctagtagctgagactacaggcacccgccatcacgcccggttaatttttttgaacttttagtagagacggggtttcaccatgttagccaggatggtcttgatctcctgaccttatgatccacccgcctcaccctcccaaagtgctgggattacaggtgtgagctaccgcctccagccataaagttcacatttttaaaggacacacgtcagtggttttcagtctcttcacaaagttgtgtaatgatcatcactatctaattctagaacattttccttaccctaaaagaaaccccatacccattggggttcactccctatgcacccctcttcctttctcctgacaaccactaatctactttctaaatctatagatttgtctgttcgggacatttcctataaatgggactatataaatatgcccttttatctctggcttccttcactctgcataatgttttcaaggtttgtccatgttgtagcatgcattagtacttcattcctttttctggcccagtaatgttcaattgtaggaatataccccattatccattccaatgatggatattttttgggggatatccactttatggccattataatttcactatgaacatttgtgtacaagtttttggttggacatacgttttcatttttgttgggtatatagctaggagtggaattgctgggtcttatggtaactatgtttaacattttgaggaactgggatgtatagcgttttgtgcctgtgttatgaaactaattatgaagcatcttatattcattatcattagatctgtctcctccattaggttttaagtttcttgagacagggattatccttcttcatctttgtatcccccacagtccagcactcaccaaggcacaaagtaggttcttaggaaactggtcagaataaaactgaccaatgcaacatcctccttcccttaaaatcaccagcatacctgggaacacaggctttctctttctctcttccctgtagcaagtgacagcttatcaggaatggaggcagctcggtattatccatcaagccttccagctgggtgcacaccctccttatctgctgtgggaccttcaccagcatcctgggatttcctcaggctgcctcatccccacaacggcagtgatgtgacccactctggtttatgcagatacgttaagagagattattttaagtaccactgaaacccaagcagaggcaaggctggtggaaaccccagtatttgggggcacactccctgtttgacatggttcaggaatgactcatacatctactttaagggggatttggacaaggaggcactaagatacctatccaggctttgacttgggagcattgtgcaggaggtttaagaaagattattttaagactatctcagaaggctggagcagcatctttctgatttcttctgctacctttcactcggagcctgtgatttctaacatgtatttcaggttggatttaagagagagctggcccctactgaattggccacctttgatgttacagtactgaggaggggagggacagatggaacaaaagtcgtaattgcccaaatttacaataggttcccagcagcagctcgcacaaaagaaatgttaatgcaataaactgtaaatggaaggaagctaagcaggatttatggctggcgcaaacctccatcaaggcactggaacctctttccttcatctgtgaggcatttcagtggtcacagtagaattgggctcatttgaaaatcagtggctgctctgtgtcttccctcccttgtgtgtcctgcaccccctacacaaaccaattcctgtaaaaacctggggaatctgatagaacaattggagaaaaacatcagtcattgagggtcaagactgcaaacccggcagagccaagagtgcacacacatttgctgtgcacatgtatgtgttacagctgcaaccaaagcgtgcgttttccttccccaagtctgtgttggggacttccgcagacacagcagatggccagagtgtttccacgtttcagcctcgaagtgagagggcagcatgtcattcaccagcctggcacttacccatccatcagggccacctctataaatggctgtttttcacatttggttccagcaggttccatctccattccggctcacacatacctttacctgtgttgtatcatgtggggtgctccttgtctccttgtccagattgctggcccgcttgcttcattaattaaccgaggagcacgtctaaatggaaaattgctttctgagatctgtgtgtcctggctccatgctgtgaggggctccctgtaattaaacacgttttaagagttgctgtcttgcgcatgtgccctggacatcggtgctttccccactggctgggtagttctgtttcagaccttagacctaaatgataataacagttacaaggaaacttgcatatcagttgattaagtgtggggaatttttttccttttgaaagttgggggaaagaactcctcagtggggaagtgatttttctgccctgtagggatgggaaaatggttaatcatcatgggggcctcaacagacctcagcatgttcgcgaagtccttggcctcaggttcctcatccatcccaccgcgagagcgatacggcttgggtaagccgcgaatcccctcactgggctccaattattccagaattctaactttaaaaataaaatattcatatttaaaagttcctgctaccgtttcaaagaagcttcccaagaagctcttcagagctggggcatggaggaacctgtcactgggtccctttctgctgggggatcagttccttttataagtaggaaaagatttctccataccccttgcaaagttcatggctgacacccctataacaaaagacaggttaacaagagcaaagcacacaaatatatttaatacaagttttatgtgacacaggaggcttctgaaatgaagcctcaaagacccagggaaaaccgcgtttttatggacagtcaagcagaaatatgatgagagaacaaaagggtttgatgtagcgtaataaacttagcaagcccgttcagattcttcttggtgttcctgtgtgacattttttttttcctttttgttttgagacggagtctccctctgtcgcccaggctggagtgcagtggcgtgatcttggctcactgcaacctccgcctcccgagttcaagagattctcctgcctcagcctcccaagtagctgggattgcaggtacgcaccaccacacctggctaatttttgtatttttagtagagagagatttcaccatgttggccaggctggtctcgaactcctgaccttagatgatcccctgccttggcctcccaaagtgctgggattacaggaatgagccaccgtccccagtgtgacatttcttttctctgggtacagggcaggacacctgtcacatgagggtcttcaggggaggagggagaaggtcagagggtgaccttcctacttctgcagttttctcgatttctttcagtttacagtactcagtaggacaaggtgcatatttggggatatcgtgttctgagccccaacagtaacaaagaacaaagaaagcctttaggcagtttttgctgagactctcaaataggaatttagagtgatggtccttgagtcagagaggccactagagaaagtttgactttccatgtagaatagcaagctctcctctggcaagtcttttccagacaaggctctataattttttgctaataaatgtgtggacaaagttatgggatgtatagaagtctgacaccaaaaccatgtcagagactttttttttttttttaaaccgagtcttactctgttgcctaggctggagtgcagtggcatggtcatggctcactgcagcctcaaccttctaggcccaagagttcctcccacctcagcctcctgaatagctgggaccataggtatatgccaccacacccagctaatttttagtttttttatagagacagggtctccctgtgttgcccaggctggtctcaaactcctgggctccagcaatccttccaaagtgcagggttatagacataagccactgcacgtgtcctgtaacaaagattgttagtaaaagttattgaaatttaaatctatgattcaagtcctgatacataagacacatggcacatggtaaaaattgatttgattacatcctaggaggcctagacttgggaaagaaggaaaaaaaaaagtatgaggctgggcatggtagcttgtgcctataatctcagcactttgggaggctaaggcagggggattgcttgaggccaggagttcaagaccagcctgggcaacatagcaagaccccatctctaccaaaacaaaacaaaacaaaacaaccacaaaaaaaacccacacaaattaaatttaaaaagaaaaagatgaaaagaaagatgagaagataaggaaatatctgtagacagtttaagtctctatttttttctacaaatgtacagttatgtattgtaacatactgcatcttttgaccctgtcttctctgtttcaacagagcttatctttttctatgtatttctgctgctactgcttttccaaaccacagccattgtcctgtaatgcccttatgcatttggccaagccctcttagcttctttattattgtggggtcttagttgatatttggggtgtatgacattacaaaacacatgggatgtagatgtggattgggagagcccctgaattgtagcactctgctttcctcatctgtaaaatgggtataatcaaagtcttggaagggtaattgtaaaggggtgtgcagacagtggggttactgttatttgcaaggatccgcccatagttttatctgcaaatgtcactagcttttgatttactcactctcgcttgcgtcttctttcgtgctgatgttggctctgctttatcccacaggctttttattattattattacttttgagacaaggtcgctgtctgtcacccaggctggagtgcagtggtgcaatcttggctcactgcaacctctgcctcccaggttcaagtgattctccccactcagtagctgggattacaggcacgtgccaccacacccagctaatttttgtatttttttggtagagatggggtttcaccatgttggccaggctgagtgatcctcccgccttggcttcccaaagtgctgggattacaggcatgagcccctgcacccagcctttctttctttctttttttttttttttgagacagggtctcactgtgttgtgcagtggctcgatcttggctcactgcaacctccgcctcctgggttcaagcagatctcatgtctcagcctctcgagcagctgggagtacaggcacccgccaccacacccagctaatttttatattttttggtagagatggggtttcaccatgttggccaggctggtctcgaactcctgacctcaagtgattcatttgtctcagtctcccaaagtgctgggatttcaggcgtgagccaccccaccgggcctcccaacaggcttttaaagcaccagggcagcagggcactgggccaacaggtatatttgggaatgtgcatttggtttcatgtgtaataggaaagagattaattaaggttgttagtgtggcctaatactaaatttcaggaagcctcacaggacacatgaaacaaatctttacaacacatatgtgttttcatgctgctgaacattttgaagacgttttgccatgctggagtttgtttgttttgtttgtgtttttgtttgaggtgccgtcttattctgtctctcaggctggagtgcagagttcagtggcacaatcttggctcactgcaacctccacctcccaggttcaagctattcttctgcctcagcctcccgagtagtgcctggctgctgttttttttttttaattgttaaattagatgggctcagtattaccgtgccttgatggagtttctagttgagggatcagtgtcatttctgggtccccatcagaattacgttcaagctataagtagttatgcaaagtcgtaggttaaatgatttgggaataaaatgtcatttgacgtgacagaaatgaacccttggaggcccacatttccactgggacttgctctcagttccagttctcatgttaagtaattttattaactgaggcaaggaggggcatgcggtgacaagggaaatattttttgctaacattttaatcctaatcacaaaatttattgtgtgtggctttatatgcatttgtagctataaagccctggaagatgatgaaagtaaaaattagaatgtgtggtttttctgcccaggtgttatttaaagcattgtatgaattgtcaaaaagattaattgttgttgcttgcagctaaacagatgataaattttaaaattatattattactgtgtgtcagcataaaagctctgtgtcccaagtgtgtcacctttttctgttgctgttgacaaggttcacattttatagcacaccgccagaaggtgttgacatatattcagattactgattaaatgtttttaaaacgtgccactcagaaactaacactgatgttctatgaaagagtcatttttcggagtaagattttttttttcccttcatcattaacatggaggaaatgttaaacactgacattttaaaaaatgaacctgggactggcgcagtggctcatgcctgtaatcccagcaccttaggaggccgaggtgagcggatcacctgaggtcgggagttcgagaccagcctgaccaacatggagaaaccccgtctctattaaaaatacaaaattagctgggtgtggtggtgggcacctgtaatcccagctactcgagaggctgaggcaggagactccctcgaacccgggaggtggaggttgtggtaagctgagatcgtgccattgcactccagcctgggcaataagagcgaaactccggtctctaaataaataaataaataaaaacgtggctgggcgtggtggctcacgcctgtaatctcagcactttgggaggctgaggcaggcagatcacgaggtcaggagttcgagaccaacctggccaatatggcgaaaccccatctttacgaaaaataccaaaaattaggtgggcatggtggcacgcgcctgtaatcccagctactcagaaggctgaggcaggaaaattgcttgaacccgggaggcggaggttgcagtgagccgagatcgcgccaccgtactccagcctgggtgacagaccaagactccgtctcaaaaaaaaaaataaaaataggccaggcgcagtggctcacgcctgtaatcccagcactttgggaggccaaggtgggcagatcacaaggtcaggagttcgagaccatcctggctaacaaggtgaaaccccgtctctactaaaaatacaaaaaaattagctgggcgtggtggcgggtgcctgtagtcccagctactcgaggctgaggcaggagaatggcgtgaaccacggaggcggagcttgcagtgagccgagattgcaccactgcactccagcctgggcgacagagcgagactccatctaaaaaagtaaaataaaataaaatgaaaataataaataaataaataaacctaatgttactgcactttcccatttcaaattgcagccagcaatgaaaacaggcattagcattcccatttcttctcttctccttcactggaagggcaacaacaaacacacccacggtgtaaaaacagcaccaaggccgggtgcagtggctcacacctgtaatctcagcactttgggaggccgaggcatgcggatcacctgaggtcgggagttcgagactagcctgaccaacatggagaaaccccatctctacttaaaattaggcgagcatggtggcgcgcgcctatgatcccagctactcaggaggctgaggcaggagaatcacttgaacctggaggcggaggttgcggtgagcggagatcgcaccattgcactccagcctgggcaacaagagaaaaactccatctcaaaacaaaacaaaacaaaacaacagcaccaaggaaggcgctaaatggctacttgtaaacaacccaggttggacactggacccacgacaaggaggcaagttccgtcctgtggtggtgtttgtgatgggaagtctggggctttgactccctcaagtttccaggctaacacacacaactcttcccagcagctgaggggccccgaagccttgatgtccctttcacgttgaaggacctcactggtcttggctgtttgcgttttgtggatggagtgggccagtcttcagagaactcaaatgtgtatttgctgcagggagtgataagtaaacataatgcctcaagaatcaacatttgaatgcttttctttttggcgttaaggtataatgggacactggcaatatatgctgtctctctgaacacagcatgaaagaacttgaaaacaaatgatttagtattcattacggaaaagttggatttttttccctctctgattgtcaagatttcttcgtcgatgtcagttttccagtgtgaatttttcctctccactcagaggaagttgacgttggttcagtgatgttacagaggatgctgtaagacagccaggagcccaggccggttgtcacttcatcccagcatggtgcaaagttagagatgttgcagtgacagccttgggtgccctcaggggcaaccaagtctctaaataatctctgtgaccaaaagtacataggaggttgtaaatatcccacaacaaaaataaagatagctgccatttcccagaacttaatgcatatcaggaaatgttacctctttatatatattgtctcatttaaatccagtaagatagcagcagctgtgggaggatgtggtttttgtttttgtttttgttttgagacagagtcttgctctgtcacccaggctggagtgcagtggcgggatctcggctcactgcaagctccgcctcccgggttcacactgttctcctgcctcagcctcccaaagtagctgggactacaggcgcctgccaccacgcctggctaatttttttgtatttttaatagagacggggtttcacatgttagccaggatggtctcgatctcctgacctcgtgatctgcctgcctcggcctcccaaagtgctgggattacaggcgtgagccaccgcgcccggcctgaggatgtggttttattcccatttaacaaaggcttgagtatcacttcttatttatttatttattttattattattatttttgagacgaagtctcactctgtcacccactctggagagcaggggtgtgatctcagctcactgcaacctctgcctcccaagttctagtgattctcctgcctcagcttcccgaatagctgggagtacaggtgtgcaccaccttgcacggctaatttttgtattagtagagatggggattcaccatgttggccaggctggtctcaaactcctgacctcaggtgatctgcccatcttggcctcccaaagtgctgaggttacatactttattaacaaaggagtgaagtgataccccctctcccctgtaagtagcagccaacattcaaacccaggtgtgtcagattttagagccacactgacattcagcagctactgactgattgtctactatgtgttaggcattgttttcatcacaccttttattttttgttttgttttttagggacagagttttgctttgtggcccaggtgtagtgcagtggcatgatgtttgctcactgcagcctcgagctcctggcctcaagtgatcctcctgttttggcctcccaaaatgctaaggtgctgggatcacaggtatgcgccactccgctcagcccacatatttttaagtctgctttttaacctaatttacttattttgggggtcttaaaaaattggctcacagccgggcgcggtggctcatgcctgtaatcccagcactttgggaggccaaggcgggtggatcacgtgaggccaggagttcaagaccagcctgatcaacatggtgaaaccctgtctctactaaaaaatacaaaaattagccgggcgtggtgtcgcatgcctgtaatccgagctacttaggaggctgaggcaggagagtcgcttgaacctgggaggcggaggttgcagtgagctgagatcacaccatggcactccagcctgggcaacaagagtgaaattccgtctcaaaaaaaaaaaaaaaaaacctatttaaaaatgaaggctcatgcagaatgctctgcaagttcaaaataaaacagagctctgagcgcctagaggctttttgccttaaggggcgaggaggaaaaagattaagatgctccttggaaaatagccctttttggctccatctcctttactgtggtcacctgcacatgcctttagttcttctggatttatatctaagcacgttgctctgctacataagaagctgacaacatcagttaccttcctggaggtgaaggagagacaaaggggctgagtgggtgagaggaatactttccaccatgaactctttggtacctttcggaaccacgtgaatacagtatcttttcaaaagaaaagggtgctatattcattgtcctagactattaagcactttaaaaggcacttcaggtaatctagttgaagtgcaaatttcactgaacccagactattatgcaaacaggactagctctgtatttattcttttatgttgtggcttgccatccaatttgtgtttccggggctgggcacgaggtggctctagcctgtaatccccgcagtttgggaggccaaagcaggcgatcagttggggccaccatctccattgtccctttttaaatttaagtgaccatagcttcttagtatgatatcaggtttttgttttcttcccaccttgtctttgttttttagtgtgtggatgcctttgaaattagtttttttgtttgcttggtttttttttgagatggagtctcactctgtcgccaggctggagtgcagtggcgcgatctcggctcactgcaacctctgcctgccaggttcaagcgattctcctgcctcagcctcccaagtagctgggactataggcacatgccaccatgcccagctaattttttgtatttttagtagagacggtatttcaccgtgttagccagagtagtccgatctcctgacctcgtgatccgcccaccttggcctcccatagcactgggattacacatatgagccactgtgcctggccaaaattagttcattttttatacatgtcctttacacaggagatgtattcagaaagattatctatattttttcctttaaacaatgcatttgtttgtttgttttatttgtaagctcatctcctgggtttagagcagaatgaaaaatttgaccttaatcttctcttatccactggttggaagctcctacttttatgtcaacagacataaaaaagcttatacatataagataatgtatagcatgcataaagatttatagaatgctatgtctcataaatttcacagttataaaacaaaacctaagcttatgcatgtggagatattcctgtgtttgcagttgtcagtgacttctagagaatgtggtaaaggaaaaaagcacctgtggaagttatttatgtaaaagttgcttatgtaaagactcaagccattaacaagagaaggagacttctttatattgttaatgacattcagatctttcttctgaatgagggttgtcactctgaatgagtgttgtcattcatttcctccaagccttcagatatctttttcctttatctgacacatttcaggaaagagtaagggaaagatttatttatattactttgatggtttcattttctttgtggaagtccagtgacccagatatagagatcttcttggaatatattactttgatggttactttctctttttggaagtccagtgacccagttatacggatgtcctcagaacatttgaagtctagttctgcattataaaatagcccagttgccataggttgatttcctgtaaacctaaatcatgattgcaaactaatttggatgctaattaggactcatataatgattatatcaatttataacttgtctaacaacaatgcatttctttctttgctaggttaagtatttacactatgacctgtgaacagggaaaccggcctgtgttgagtactttctatgagccaggtgctcgactgtgtacaaacttagaagaaccaggtgcacacgccaggtttgggggccgtttgacagtcagcattcaataaatgtgttgtttaagttgatataattaatttaaaaggaagtagcaggtgatggtagtacacttcattgtcctagaatattaaatactttgttgtcagcagacggacttctttcatatgcacaggtcatcttgagcacggatcctaagcctagtctttaatccttcctagcatcctacatgagccaaacttagacaaaaaacaaggcaactcttggttatctagggcaatttgaaatctcagctacctccactgtgtccagctcaccgcagttatgcatctatttacaacattatgtttgcaacattatgtttaagcaaaccacaatgaaagcattaaacatagaataactatgatccagcaattttacttccaagcatataccgaaaagtgttcaaagcagggactcagatactgtgttcctgggtacatgggtacacccatgtttatagcagcattattcttgatagccaaaagatggaagcaacccaggtgtccatcgacaggtgaatgggtaactacaatgtggtgtacacatgcacacacacacacacacgcaagaatattattcaaccttaagaaagaatgaaattctaccagtcacggtggctcacatctgtaatcccagcactttgggaggctacggtgggcggatcacctgaggtcaggagtttaagaccatcctgaccaacatggtgaaaccctgtctctactaaaagtatgaaattagccaggtgtggtggcacatgcctgtcatcccagctacttgggaggctgaggcaggagaatcgcttggacctggaaggtggaggttgcagtgagccaagattgtgcctttgtactccatcctggagagcaaaattccatctcaaaaaaaaaaagcatgaaattctgatacctgctataacacagatgaaccttgaagatatgctgagtgaaataagccatatgcaaaaggacaaatatgtgattgtacttatatgaggtacctagagtagtcaaattcacagcacagaaatgcgaatggtggttacccggggctggggggaaggagggaatggggaattggtgttagtgggcttacagtttcagtagggggtgatggaaaagttctagagatacatagtggtaatggatgcacaatattgtgaaaggacaaaactatacctaaaaatggttcaaatgctaaattgtatgttatgtatattttgccccaatttttttttttgtttttttttgttttaaagacagagttttcctcttgctgcccaggctggagtgcaatggcatgatctcggctcactgcaacctccgcctcctgggctcaagcaattctcctgcctcagccttccaagtagctgggattacaggctcgtgccgtcatgccccgccaatttttgtatttttagtagagacagggtttcaccatcttggccaggctggttttgaactcctaacctcgtgatccacccactttggcctcccaaagtgctggcattacaggcgtgagctaccgtgcctgacgtattttgccccaatttttaaaagcaacataataaagacaaagccactgggaaggatataaaatgcccctgagccaaacactgtatagccaaaagagcaaaactacaaaaactgcaccaagcttctttgtaaattcattcttccaccctccaggacactcttgcctggtttgcatcctgagagtctcctggggttccagttatttcaaggtcacagtcaggtaggcacggtggctgtgctatggtggaaatggcttttggattcctcgtaattttggattatcggtgccctgtttttctgagaccaaaacttatcaatagagtattacggaaggtgatatgtagtaagtgcacctttcttgggcattcagtctaaattcaatagtaaagggaaaatcacatatagtcaagtccaaattgctcatgatgttacagtagatctacatgtccctaacttgattacctattttccctccagcactggagtgcatctctgcttcttcagccgagctccagaaggagaagatggctgcatttagagtcagactggaggaaaaggagcattttgatattttattttatttttatttattttttagagacaggttcttgtgttgtcatccagactggaatgtagtggttgcagctcactgcagccttgacctcctgggctgaagccatcctcaagcctcagcctcctgagtagccaggactacaggtgccgtgccaccaagcccagcgaatttttgtatttttttgtagagacggatcctgctgtgttgtccaggcttgaaatttgattttaaacatattaggcatcacactaagcccccaagacaagatagaagcttacagaaccttgactatctggaatgactttcacagagtgatttcatctttcttcttaccctcaatgagtaacgtgaaggctgagcaggtcatactgttcaaattatttatcttctttagacttttttcttccaaacaccagtagttgaatttgagtactttaagtgctagtattatgcaatttcattttattttattttattttatttttgagacagagtcttactctgttgcccagactggagtgtagtggtgcgatctcggctcactgcaacctccgcctcccgggttcaagcaattctcctgcctcagcctcccaggtagctgtgtttacagtcatgcgccaccacgcccggctaatttttttgtgtgtctttagtagagacgggatttcaccgtgttggccaggctgatctcgaactcctgacctcgtgatctgcccccctcggcctcccaaagtgctgggattacaggcttgagccattgcacccagcctggattaatgatttcgaatgaacatttacaatgatatgttttataataaaacacattaaaaagtttgaaacactagttactagaaacagttctctctgtaatgacagttagtcatgttgttgctgcagtgacagttgacttggtgtgagggtattgataaagcctggtgatttgtacacttgcccatattatgcttttcccaggctagctatgcaaatctcatttcccttacatttgaaagtcatttcagaattgtttcattagggttgaggcaagcacaaatcatgaatgcctgtgtcttctaccaccaaacagattctgttggacccacaactgatatgctttcagccaggttccatttagcattcaccctggacttagggactctacaagagtgctgggtatttagttttgttttgttttgctttttgagacagagtcttgctctgtcacccaggctggattgaagtggcgcaatctcagctcactgcaacttccaccccctgggttcattctcctgcctcagcctcccaagtagcagggattacaggtgcccactaccacacccggctaatttttttgtatttttggtaaagactgggtttcaccatgttggccaggctggtcttgaactcctgacctcaggtgatccacccgccttggcctcccaaagtgctaggattacaggcgtgagccctcacacccggcctgatgctgggtgttttgtacagtggtcccaccttactgtgtagaaattctcagtcatccacctaatttgtttatttcccattcatatacttcatttattcactcactcacttggccatttatgcatatttattgattttgttaaaaagatacctgaatgagtggaacactgagatgatatagtggaatggacggatagtggttagccccttggacccatgagggccaggttctgaaattccagctctgaaattctaccagctggttgaccttgggcaaattacttagcttctctgtgcctcatttcttcatttataaaatggagataataggttaagagggttagatgagacattcattcatagtacttggcacacagtaagagcccagtaaatactagctgttgttatggattgaattgtgttgcctccccacaaactcatatgttgaagtcctaaccacaggtactcagaatgtgattgtatttggaaacatggccattgtagatgtaattatttaagaagagtgattaggctgggcatggtggctcacacctgtaatcccaacaactttgggagcctgaggtgggcggatgatgagggcaggagttcgagatcagcctggccaatatggtgaaaccctgtctctactaaaaatacaaaaattagccgggcgtggtggcaggcacctgtagtcccagctactcgggaggctgaggcaggagaactgcttgaaccaggggggcggaggttccagtgaaccgagataacgccactgcactccagcctgggcggcagagcgagactctgtctaaaaaaaaagaaagaaaaaaaaggagtgattaggttgggcactaatccaatatgattgctgtccttaaaaaaagagaaaatttgggcacagagatagacatgcatagagggacaatggccatccacaagccaaggagagggtcctggaacaaatcctttcttaccagtcctcagaaggagccagccctgctgacacctcagtttcagacttccagcctccacagctgtgagacaataaatgtctgtcagtgaagccactcagtctgtggttctctgtcacagcagccctggccgaagacacagctggcagcaccgtcctccgctactgtgtttctcattgacccgagaacctgcctttgtccatgtcctggccaatgggagatacattttctccttctcagcttgtattcctgtccttttctttctttttttacaaaatagcatacaaaaaagttcctagcaagaagaggtgctccagaagttccctggctgtttcattcctgtgtctcttcctaaaaagctgcagttgaaaagatagaatttgttttctcttagcacattcttctcactttctaagcttgatttttctttctttgaaagagtgtaaccccttcaaaattaactcctagagattgctcacctccctcccaaactttcgatgaggagcgtttattttgtagactcttatgtgtgaattctttcaataaataggggatgcagagaagcagctttgtggagtgaagcagtaggaaagagcctgttggggagagagcttcgccactgcatttcagtagctggtttcgcccctaccttttttttttttctttctttcttttttttttttttttttgagacggagtctcgctctgtcgcccagtctggagtgcagtggcgctatctgggctcactgcaagctccgcctcccaggttcacgccattctcctgcctcagcctctccgagtagctggggctacaggcgcccgccaccaagcccggctaattttttgtattttcagtagagatggggtttcaccgtggtctcgatctgctgacctcgtgatctgcccgcctcggcctcccaaagtgctgggattacaagcgtgagccaccgtgcccggcccacccttacctatttttaaatggtgacttgtgtttttatttgtttgtttttaaagacacttgaaattggacagtgtttctccatcctctccagaggcccagagcaatgtcgcaaggatgcattctggacgaggcagtcacggggccgcacatggcatttgttcttctcagggaccgtctgctgtgtttctctgccccagtggagctgggggaataataaagctcttattatttatactgcacagcatttttttcagtggtccttgtcattgagacttatgaagacaatgtaggacaagagggaacttgtgagtttttatgcaggtagggaagaaaagtaaaaggggctatatttccagggatattgctttttcccaaacccctgcacttccccagtccttttctttatcttcctttcccaaatgagaggtgtccttcttctccggtatcagccccctagtttcttccctgtcctcggggaatcttggtacaccatttagcccctgtcttggtttttgactctgtccctttgtggaattcttacccatagcttacagtgatgtttcacatacatctctgccaaagatgaagtggaaaataacctttgctttgtaagcacatctccttcaagctatcgacaagtctcctggcttctcttagtttctaacccctttttttttttttttttttttttgagacagagttttgctgttgttgcccaggatggagtgcagtggcgtgatctcggctcactgcaacctccgtctcctaggttcaagtgattatcatgcctcagcctcctgagtagctgggattacaggcgtctgccaccacacccagctgatttttgtacttttagtagagaggggttttgccaggctagtcttgagctcctggcctcaagtgatctgactgccttggcctcccaaagtgccaggattacaggtgtgagccactgctcacagttatctatttgtcttagtccatttaggctgctataacaaaataccataaactgggtgtcttataagcaacagaaatttatttcccacacttctggagacttggaggtccaagatcaggcagtggcaggttcagtgtctggtgctaaggaagcacctgcgcctcccggtccacagacgcacaccttctcactgcgtcctcatatgacagaaggggtgagggagtccgtctttttttttttttttttttttttgagacggagtttcgctctcgttgcccaggctagagtgcaatggcgcaatctcggcacgcaacctccacttcccgggttcaagcgattctcctgcctcagcctcccaagtagctgggattacaggcatgcaccaccacgcccggctaattttgtatttttagtagagatggcgtttctccatgttggtcaggctggtcttgaactcccgacctcaggtgatctgcccacctcagcctcccaaagtgctgggattacaggcgtgagccaccgcacgcagctttttttattttttattttttaatatttttgagacagagtcttgctgtgtcaccaggctggagtccagtggtgccatcttggctcacggcaaccttcacctcctgggttcaagcgattctcctgcctcagcctccagagtagctgggattacaggcgcccaccatcacgcccggctaattttttgtatttttagtagagacaggatttcaccatcttggccaggctggtctagaactcctgacctcgtgatccacccgccttggcctcccaaagtgctgggattacaggcgtgagggagtctgtcttttataaaggtgctgatttcatttatgagagctcagtcctcgtgactaatcaccaaccaaaggcctcacctccacatttgatcacactgggaatgaagacttcaacatactttgcaggggacagaaacattctgtctatagtaccattaactttctgctatggaagttgaagacagttctcttttgtcgtattatacccctgatacacacttcagtgtttatactgtgccaaggaaagcagtgttcacagctgagccatacggtacactacaattttcctttctcatataactttttgtccccttggagttagcaattgactttttttttttttttttttttgagacagggtctcgctctatagcgcaggctagaatgcagtggcgtgatctcggttcactgtgacctctgcctcctgggctcaagcgatcctcccgcctcagcctcccaagtagctgggaatacaggtgcgtgccaccatacccagctaatttttgtttttttgagttttttttttggtagagacagagttttgccacattgcccaggttggtctccaagtctggagctcaagaatctccctgccttggcctccaaaagtgctgggattacaagtgtgagctaccacacctggccagtgattgactcttttgctaaaactaattttttcttccaactctttgacaaagtcgtcaatattaagcaatatacccttactacttttgattttgtttttaaaggaattccttctggagtcttctatcctgaacttgtcgctttctaggccagctgcatttctgtgtttctaaaacttccattgtttataaaacaccataatcctggcgtttgctctgtttgtactctgtatttccagtatctggaaaccatgtcttctttcttggcttatttcctcattcagggctgtgtgtcttctagtagttatgtgaaaagagggttcgtgaaagttaaatgtttttgaggctatatgtctgaagaggtctttggtgttcttcagacttcatggaaaacattttccctaagaatgttaaaggcattgctcccttttttgcttctaatgctgccattgctttaaaatggtgccattttgattcttgatcctttttctgtaaatttttttctctcttgaaaatctctttcttgaagatctctcttgaagatctctttctccctagtcctctcaaactttgcattgatgtactttgatgggatcatttttgttaattatgtaggtgttccataggcctttcagtctgaaaatttatgtgttttagttctaggagctttctttgtatttctctatttctttttttttttttttttttttttaagacagagtcttggtctgtcgcccaggctggagtgcagtggtgtgatcttggctcactgcaacctccgcctcccaggtccaggtgattctcctgcctcagcctcctgagtagctgggattacaggcatctgccaccatgcctggctaatttttgtatttctagtagagacggggtttcaccatgttagctgggctgatcttgaactcctggcctcaggtgatccgccctccttggccttccaaagtgctgggattacaggcatgagccaccatgtctggcctcaaatttttatttttgatagctttttcatgttctctaatgtttctgattgattgattgattgagaaagggtcttgctctgttgcccaggctggagtgcagtggtgcaatcatggctcattgcagcctcaacctcctgggctcaaatgatcctcctgcctcagcctcccaagtagctgggactacaggcacaagacagtatacctggctaatttttaaatatatttttttgtagagacagggtttcgctatgtgcccaggttggtctcaaactcctgggctcaagcaatttgctttcagcttcctaaaatgctaggattacaggtgtgagtacatggcacctggccgtgtttgtttgtttgtttttgagacagggtcttgctctgtcacccaggctggagtgcagtggtacaatctcggctcattgcagccttgacctcctgggctcaagcaatcctctacctcagcctaccatgtttcttttataaatgatattttattcctgtttttgcatgtattataatatcttatttctctgtttgttctgttttttgctctgttctgctctttgcattgtccgtttctcttgagtgctcttcctggttgtttgtttcggtttttatctttcaagttgataacttttgtcgaaggtctggtggtgtttgactgtcagtccatatttaaaaatgaggaactggcctggtgtggtggctcacgcctgtaatcccagcactttgggaggccgaggtgggcggatcacctgaggtcagctgtttgagaccagcctggccaacatggtgaaaccccatctctactaaaaatacaaaaattagcttggtgtggtggcacacgcctgtaatcccagctactcaggaggctgaggcaggagaactgcttgaaccggggaggtagaggttgcagtgagtggagactgcgccactgcacttcctcctgggtgacagagtgagactccgtctcaaaaataaataaataaataaataataaaaataaaaatgaggaacttaaggaccaggagcagtggctcctgcctctaatcccagcactttgggaggccgaggtgggcggatcacttgaggtcaggagttcgagaccagcctggccaaaatggtgaaaccgcgtctctactaaaaacacaaaaaattagccaggcatggtggcgggtgcctgtaatctcagctacttgggaggctgaggcacaagaatcacttgagcccaggaggcagaggttgcagtgagccgagatcataccactatactctagcctgggcaacagagcgagactctgtctctaaataaataaataaataaataaaaaggaggaacgtaaccatcaatagagagttatttgtgtatggaactgatgggcctcactgtaaggttatcagctgggggcccaccagcttcaccagaggatcaccacatatcagtgtctgtaggcttgttctcctgggctcttctgtttttcagagaggtatcctgtgctctccagcttcgggggattagacctggcttccagcattctagaagccaaggctaggaggcaactggggaattctcattattccatacctggactttcactcagcccgtttcagcttttgactaactcctccccttcactgtgttttgcctccacaaagtgaaagctttttggggttccatttctccagggatttacttcctttgcccttttggaatgggacaggttaaggtctaagtgctctttatagagattttctttttttctttttcttttcttttttttttttttgagacagtctcactcggactggagtgcagtggtgtgatctcaactcactgcagcctggacctctagggctcaggtgatcctcctgccttagcctcccaagtagctgggactacaggtgcatgccaccatgcctgggtaattttttgtattttttatagagctcaaggaatccacccgccttggcctcccaaagtgctgggattacaggtatgaatcactacacccggcctgtacggattttcaaacaatccttttgttccaacccactaccctgccttcagagataccaggaacctctagttcctaagctgttccagagtcctgtggtagaaataagcttgatgcttttggcttgtcatgtttctcaggtcccggggctgcaggaagttagtagtcagtgttttcacttgttgattcactctccatttgccagtggtttgttaacatctcttataagggattgattcttctgttatatctgtttctgtggatttatactcctcccctcttcattgtgggttttagaaagaaagcggagacaaatactaataataatctgccatgttatttagcaaactttttaaacatttttaaattatgaatgagtattgaattttatcaaatgctttttctccatctcttgagatgttcaaaaggcttttcttttctcatctgttaatgaagtgaacaataataaagtgttttgtaatgttaaattgtccttgctttattggtgtaattttttttttttttttttttttttttttttttttttttagagacaaggtctcgctatgttgctcaggctgggctcaagtgattctcctgcctcagcctcccgaatagctgaaatactggtgtgcgccaccatgcccggcagacgtcatttttcagtttgctgaaattctgaattttatagaaatgtaaaattgagactggcctatatttttctttcttttcttttcttttttttttttttaatagagtctgtcgcccagactggagtgcaatggcgcaatctcggctcactgcaacctccgcctcccgggtccaaatgattctcctgcctaagcctcccaagtagctgggataacaggcatctgccaccatgcctgggtaatttttatatttttaatagagacagggtttcaccatgttggtcaggctggtctcaaactcctgacctcaggtgatccacccacctcggcctcccaaagtgctgggattacaggcgtgagccaccacgcccagcctatacttgtttttgcctccttcagtttttatgcttttttcagaaatgaattgggaaaaaattatgtgggaaactttccctcttactttaatttcttttcttttctttttttttttttttttttttgagacggagtttagctcttgttgcccaggctggagtgcaatggcacgatcttggctcaccgcaacctctgcctcccaggttcaagcgattctcctgcctcagcctcccaagtagctgggattacaggcatgtgccaccacgtccagctaattttgtatttttagtagagacggggtttctccatgttggtcaggctggtctcaaactcctgacctcaggtaatccgcccaccttggcctcgcaaagagctgggattacaggcgtgagccaccacgcccagcccccctctttaatttcttgaaccgcttgtataagatatgaattatctgtttcttgggctggcatggtggcttacgcctgtaatcccagcactttgggaggctgaagcaggtggatcacctgaggttaggagttcaaaaccagcctggacaacatggtgaaaccccgtctctactaaaaattcaaaaattagctgggtgtggtggtgcacacatgcaattccagctactcgggaggctgaggcaggagaattgctagaacccaggaggcagaagttgcagtgagctgagatcatgccgttgcactccagcctgggcgacagagtgagactctatctcaaaaaaattagaaaaaaaaaaaaaaaaaaaaagaattattttttatttttttgaggcagggtctcggtctgttgcctaggctggagtgcagtggcacgatctcagttcactgcatcctctgcctcccaggctccccggatcctcctgcctcagcctcctgtgtaactgggactacaggtacacgccaccatgcctggctaatttttgtattttttgtagtgatggggttttgccatattgcccaggctggtctcagactcctgggctcaagtgatcctcccacctcagcctcccaaaatgctgggattccatgggtgagccactgtgaattcactgccttgagtaatctgtttcttaaaggcttttgttaaaacttgttagaaattatctgtacaacttgggtgtgtatgtgtgtgtgtgtgtatctgtcttgactactaatgcagcatatttaataacataggatcacttcagatttcctagctttcatttattgaattacagtacttttgattacttatatttatctggaatatagttcacattctctgtttttaagtttattgccataaagttgtttttagcattctcttactgttttttgtttgtttgcttttgtttttgtttttgttttgtagagacagggtctccctaagttgcccaggctggtctataactcctgggctcaagtgatcctcctgcctgggcctcccaaagtactgaaactataggcattagctacctctcccagcctcagaagcttttctacacccttcctaggggaatggggagataagtaggggtcacttagggagtaaatgattatgaaaaggggcatgggcttttgcaaaaataggcagtagcctgtccggaccaggtgccaagttccagcctcttctaggtttgactcctgttgcctgttaacctcccctgatagattaaaaaaaagaaaaaaaaaaaaaaacctagagagggttttcatgacaattggcttccttctggagaatctgcatttcactggataagggagattcaggaaaagcccctctgcatttgctatttcccaaatgccttcagcttgaagtaaccagcaaaccaattcagcatatttgggctggtatttcctggactcgtgtctatgaggcagtgcttcttcaggtgctgttcaagtcttactaaatttatgtccattagatctatccatttctgcttctggttgtgagtttatcaattacttctgtaattctaataattttattgtttatttcagatgtctgcaatttgagaaatatttttctgataaaatgttctttttatcattagataatgatcttctttatcctgagaatgtttttgccctagtttctatcttgtttgatattaattaattcagtcactcactcagcaatacctgttgagaattttttttttttctgagcagagtttcgctcttgttgcccaggctggagtgcagtggcatgatctcagctcactgcaacctccgcctcctaggttcaagcgattctcttgcctcagcctccccagtagctgggattacaggcatgcaccaccacgcctggcttattttgtatttttagtagagatttctcctacatggggtttctccatgttggtcaggctggtcttgaactcccaacctcaggtaagctgcctgtttggcctcccaaagtgctgggattacaggcatgaaccaccacacaaggcctattttttttttttttttaagacagggtctctctctgttacccaggctggagtacagtggtgagatcacggcaaccttcacctcctgggctcacatgatctccctgcctcagccttctgagtagctgagactacaggcaggcaccaccaagcctggctgaattatttatttatttattaattatgagatggagtcttgctgtgttactcaggctggtctcaaactcctgacctcaagtgattctactgccttggcctcccaaagtgctgggattaggcgtgagccaccatgtccagccaagaacctgttctatgccagtcacatcaagaaacaaaacaggcatcacctgacaatatatatatatattttttggagacggagttttgctcttgttgcccaggctggagtgcagtggtgctatctcagctcactgcaacctccacctcctgggttcaagcgattctcctgcctcagcctccctagtagcttggattacaggtgcccgccaccacacccagctaattttttgtatttttagtagagatggggtttcactacgttggccaggctggtctcaaactcctgacctcagacaagccacccacctcagccccacaaagtgctgggattacaggcatgagccactgcacctggcttgacagtatctttttattttaatcacctttttattttttactttcaaccattctgtgtccttctgttttaggtgtatcttttataaacagtattaaattgaaactttttttttctttaaatgtaatcttggtcttttagcagggatatttaatctgttcacatttgttgtgattgctaatgtaatcaaatttggttttactaccatatgttactaattttatatactatgctgtttacttactgtatttccccttttcctgcttttcattgtacttagttctctttattttttttaagttttatttattttattatagttttcttatttattctactttgcttatttcttcctattgatttagaaattatacattctattttttcttttggtgattacatttaaaatttaatatgcatattttatttgagtctaaagttaatggatatttctctgctctccttctgatcaaaatgcctcggaatattttggctctgatattcactcccagtctttcgtattccctgtgtagcatgttatcagagtctagtacttaactttttggttcatttttttttcagtactttgttttaaatgagacaacattataattgatattgctggctcatttagatttacttacatgtttactctctgctcaccatcgctcctttggatcccactcttttcttttggattgagtctttttatcctgaaatataccattggtcacttctctcagtaaaggtctaacaatagtaactttcttcagcctttgtatggagaacgtgtttattttgcccttcctcttggatgattgcttagttgcgttcaaggctaaaagctatattctctcaatactttgaaaatactattccattaatttttggttgattttgctgcttagtaacattctgctgtgaagaaaaattgttcttttttcatgggtaatctgtcttttctctctatgtgttctatagtttcactattatgtgttaggtgttgatttgtgattgtttatctggctcctgactgtgctgttcaatctgagaatgtaaatgcttctttccattctgaaaacatctcagtcataagtcctcattctttctattctctcattagcatttgttgtaaggtctcatgttccctcgtttcttaacatcttccatctcctacttctctgtgccatgtcctgtatgatttccccgcatccattctgtagttccctaattctttttttttttttttctttttgaaatggagtttcactcttgccgcccaggctggagtgcagtgatgtgatatctgcccactgcaacctccacctcccaggttcaagcgattctcctgcttaagcctcctgagtagctgggattacaggcacccaccaccacgcctggctaattttctgtatttttagtagagacggggtttcaccatgttggctaggctgatctcgaactttgaccgcaagtgatccacccgcctcagcctcccaaagtgctgggattacaggtgtgagccatgactcccggcccctaattcttttattggccatatgtaatctaatttacttactatttcagtgactctgtttttttccttctaaatctgctgtttggttctctttcaaattaatttttctttttttattttctttttttaaatatatatatatatttttattacactttaagttctagggtacatgtgcacaacgtgcaggtttgtaacatatgtatgcatatgccatgttggtgtgctgcacccattaactcgtcatttacattagttatatctcctaatgctgtccctcccccctccccctctaatttttattttcaatcgtgtcctattctttcaatggttactgttcttgtgtcactttaatagctctaaacacatatatcagattcttttttaggttgtcacttgtttccagttcccaggtacccattggcccgcatgttgtacttgctgacccttggcgtggtaggttagttcctggcctggttggaattttttattgtgagctcatcttcagcaggggttatttttgcctctgggagtccaggggccctggattgtggagatgtttctggagcactgctttacctttttcttctgcaaaccaaggctcagttattttagggtcttgaacaagttttaatttttaatttctctatttgtgatttccaacccatctgggtggtatcaacttaatccctgcatttgctcttagcacaggctcctgattcagatgattcatacaaaagcttttagttacttttcagagctcaagccagacctcaggcctccttcctgtttctttggtgagcatggttcttccagttcccttttcatggactggctagcttcttaaggggtctggtttggtccagtttccccctcatcttgcacagtcctggctggtgtcttctttccccaggggtgttgacactctgacccctacttattgtttcaagggctgacagccctcggtggatacatcagcttggaggtttcctcccagccctggagatttgctttgtttctggcacttgggaatctctctttcctctttctatcaagctgagctacgcatgaaaccttttttttttttaagttgctttagattttccaatagctgtgtgtaatttcagcaggagtgggtccgcatcaactcagcctgccacaaaccttattcatctttgtactctccaacccagaacagtcactggttcataccagatgctggatgaatgaatgagtgaatgaatgaatgcatttttcacttccagtagcagatagaagcagtattccagtgagccatgcctcctacctctccaggagcactgaatcaggcagaattcacttttctttgaggttatacgtagagagttcccagtgaaaaaatgaaaagagaatagggcttcttctatgcttttgttttaagtcccagaacaataggactgtttaactgctttgcactgcttgatatatgaaggtggactgacgactgagttcccatgccgcttgctggtggcttcacacagcatcattaccaagaggacaggacactaggactgtttacttccccctttctcccctgttttaagaaaagtgtgcctttgatgagatatagccgcaggctcttgttttacattgtacgtcaactgctgttgtcagaggctggttattgatgccatgccctgttttaattcacacttctctgctaatcaattacagcgtttatccattaatcaggcattctgacagggtcaataactgctttttggctcttgtgcagggctgcacgttatcaagccaggaataaggcccaggagctggctttaaaacaccgtgtgactttcccaggctggtggacttccggagcaataaacatctagtggggatttcatatggtgggtttttcatatatttggtagatgggattttctcactgaacacttcattaacagggctcaacgttagtgaagtgtggacaggtgtgctctgtttaagaaaaacagaaacatcaaaaggtaattattgccatcacataccaatgactgcatttacctaaaagtagcattaaattatgagctttcttcttttatattaaatgtttacaaacagtatcttcttggcagtagggtttgagagcaacgactcttaaagccaaaatgttggagctgctgctggatgaaaaccaatctgaaatttagattaaatagggctgtaatcgtaatgtgagtcaagaggaaaatccgtagtttctctctggaaatttcttgaggcccatcttttccgtggagtgttttaaaccttcgtatccatgttcccatccatgggcacacgggcatcttcagtgccccttagtctctctataagaatttgttacagcatattcagatgtggtaaattgtcacagaaatgaaaacttttcattttagtaaggataagtaagaaacagaggtgacaaggtttaactggagagttccagtttgggtaggtaagttaccattcatcatgatggttacaggtttcagtgatcttttttgtgacagatgtaccaacatttaattgtttttcatcaagggcggagagaaaagacacttgtgtagatttttcaattctcctccgtgtcacttggctgtcctcaccattgtctgagctcctttctcttatcctttttgctgcaatgagttgtgtcattccctcatggtcagcacttttgttgtctttgttttttgctgtacctcagaagtccatcttttctttcatctctttcccattcatgcatgagggaacagttgtgccctgttgtggggatgttccgctgggtttcaaacagtagggtttctttttattctcttctaagtagtacaatggggctgaatgtctgttgcagaatgcacacactaatatgccaggttatttggtttctaagaagtcaataaaaatactacatttaggctcagtctttggcttgattttcccctatttgcctttcaagccttccgttatgaatctgtttgtttctgattgtaaaatataatcttgcatattaaaccgaagcgtggaatcaacaaacactttgaggaaaatgttcctggcggtggagtattttcacaccaggcagggttggcagccggcaccctcccttgataagagcctggaaacagcccccagagcaattaatggcagctccgacttggagaagatgaaaaaaaaaaaaagaatggatcccaagttggtcttggcaaaactttctggtgtaagaaaccagctcctctctgcatttagagggtacagctgtgattgttttcgtgcagacttctcactcagttcttgttttggtggggagttgagcacgagcagaacgcaccgagttacacacacagacgcaaaggccattgcagcagcaaaaggctaaagacataaaaagttagagatgtcttaggacactttgttcttatattcaggaacaatcttcaaaatcctccttaatgaggtcataaaagaaaaaaatggaacaagtgttccttgtgtacctctctagggcgtgtcgttggggtcacttgccaccagtatcctatttaaaaagggattggggtagttcaatcaagcattgcattaagagagagactttgattaattccttctcttttcttttgtgctatagataatttcagtcaatttgtgatactttcttcttagccattgctgaggctgaaagttcttgatgcgtcctgctgagtattagcatttctcgggcctacttggctatggggaagaggcacgcactgcagacagctctctaagccttgacaagcagggctggcctctacacatgaccgtgatctgggatatcggtttaggaaagagcccgctctcaggttgctggcagaaaacaaatcttgatgtaaaagaagagaagaccgaacagtaagatggtgacttgctgtggtaataccgtgcggtttttttaaggttctggacctgcttcttactcagaagctcacagcttgggtaagtttcaggaactgctctcaaggggaacaaaagaaaaggaaaagtgagggctaacaatgtgagctttcactggggctgttgtgggaaagttgaagattggccccaggatggtcaggatcaggtagaaaactggattctattgtcatttgttttcttttattgaccagctttcttgtttgtggagagggcagcagagagatgaagggacattctagtactatgctgtagaaactcagtgggaaatgttaactgttttgatgttaggatatatctaaaatgcttagttaaactgagtcccatacctgttgtattttataagctcattttggaaaatgtacgtaatgtttatttattgtaaatgcaaggtctgttcggtatccgtacatttccacgccgctgaaagggtggatttggttctgatggactggaacggctcccggggaggcattgtggtgtttgcgtaaatcccctttcctttttggtttactcatttgatgcaggagggtcggttcttgggctgttgctttctctcctgttaatccagctactgcacatgcgcacgaaggcaacaggttaaaagtcctaatttaagatagctttgggtatggagagataaaatccctttttctccagttgaagcatctgtttttcagttgagtgtagatgggttgattttcatgaatgtatacatctaatatgtttatgtaaacacattaaggcaagatttcagaattaatttcagagtatgttttatgataattactgctattctgccaaaagtttaatagccaatcataagaattttcttaaattattattttcaaattaataaggtgttagacttctcatttgttctttctggtactgttttgagattaagaactcaaagatgaactcattcattcatcaaatattatttattaaactcttcctccatgccaggctcattgtcataattatcattgtaattagtctgtaacttatatttacaatgattatgtaaatagcggaaacacctaactatcctgcttcttggtaatcaggtttaactctccatggggtcggtgtgttctttctgaagcatgtctttgaatagattactcgggccttcccctagttcttggaatgctaactgaaattgtgtgattgatagatttccccagacttaaaactggagagatccatgggggcagagtggttccatggaggcagagtggtgtcatggagaggacacaggctgtcgtcatttacttttcctgccctgaaaagggaagagccagcagctcaggggtcggtgtgagacttaaactctgaataatgtaaagcggctggcacaggcctggccctcagtgcgtccccccatgagcgcccctcccccgccccttatccctaaggcagtagtgtctgtagggcctcaggcacctacattctcatttccttcatgtatgcagagggccagggaagttacctggttaccacttgctctgtgccacaaaaaaggcgtgcaaggatgtacatcagaacctggttttgactgggcacagtgactcacgcctgtaatcccatcactttgggaggctgaggcgggcagatcacctgaggtcaggagttcgagaccagcctggacaacttggtgaaaccccatctctactcaaagttcaaaaattagacaggcatggtgtcacacgcctgaaatcccaactactcgggaggctgaggcaggtgaatcacttgaacctgggaggcggaggttgcagtgagccgagataatgccactgcactccagcctgggtgacagagtaagacttcatctcaaaaaaaaaaaaaaactttgtttctgtgcacaatacctcaaagacttgttaggcctggggaatagacctgcctcatttgcttgtttgaagcctaattgcaggtatttctaatacttcctacagtggatttctctcgtcttccaaatgttgcttttccacagaattggcgtggtaattgctgagaagaaagaacttccttaactgaatcaagcctgcctccacctcttttctaggattgcaggttccttttcagataaaggtctcaaaagggcaggcagggcagaaggtcttctcataaaatccgaggattgtggtcctctgggtgcttcatctgctgcaaccaagtagaaaaaaaggaataaacacaaacacatttcactctgcctccaacaaacctccttcaggtcagatctagtatccaagaagtaacaaaaatagtccatctagcaaatgagccattttctttgagagacaggcaagcaagacacctgggtttgtctagatataattagttatttctcccgtggccagtatgggagtaaacactatgcagtaaacaccagctgaagaacattgtcctgtctatctcaggacagggaatgatagataccttttggtctctacttaaagacagtattgccgggtgcggtggctcatgcatgtagtcccagtactttgagaggccgaggtgggcggatcacttgaggccaggagtttcagaccagcctggccaacatggtgaaatcctgtctctactaaaaatacaaaaattagccaggcatggcggtgggcttctgtaatcccagctgctcaagagactgaggcaggagaattgcttgaacctgggaggcagaggttgcagtgagcagagatcatgccactgcatgtcagcctgggcaacagagcaaaactgtctcaaaaaataaaaatatagacaatattagtattaatattacagatcccattatatttcttttcatgagttttgtgagggtattccccaaagctctgtgttttggtgggggggattacaggtgtgagccaccatactggccccctcccccaataaatataaactgggtacttattaatacttaatatacatatgtttcttttcttttcttttttttttttttttgagatggagtctcactcttttgcccaggctggagtgcagtggcacgatttcggctcactgcaacctccgtctcctgggttcaagcgattatcctgcctcagcctcccgagtagcagagactacgggtgtgtgccaccacatccggctaattttttgtatttttagtagagatggggtttcactgtgttagccaggatgttctcgatctcctgacctcatgatccgcctccctcggcctcccagagtgctgggattacaggtatgagccaacttctttttttttttttctttttaatagagacagggtctcactgtgttacccaggctgaagtgcagtggtgcaatcacgcctcactgcagcctcaacctccagggctcaagcagtcctcgcacgtagctgggaccacagttgtgcaccaccatgcctggctactgtgtgcttttttgttttgttttgttttgtttttgtagagatggagtctcattatgttgcccaggctggtctcaaactcctgggctcaaagaagcctcccacctcagcctcccaaagttctgggattagaggcatgagccaccatgcccagccccaccccagtaaatataaactgggtccttccttaataccttaaagacagcaattttcgacatattcaagacagttgttccttctgctttggaatgctgagagcttctttcctcataattgtgttctagaagttctgcagggccttgctatgggaaccagagaaagcagaatggccagggccatccaattgtctccttcccagagatcaggatgaagggctgtgttaaaagatctctctcatcttcagctggaaacaaatagtactgaaaagaatgatctggactgtttctcttgtcttttaaaagtgtgaggcctaaagaggggagagagtatctttgtgctgtgttatgcctgacacattgtcggtgaccaacagatgtacttggccatttatatggggataacatacatgtgatcttagccaaaaggccctccaaaccttccttcagcagccctttagattgggctcctttgtcagtcatctgcttgagtatcagctatgctgaaggaaaagacatagggaatggtggttggaggtggtggcagccagagataaatgtatctctgaggcatggtttcatctggtcagtaagatgtgtgcctttggatctgcttcgggctaaatatcttaggggtttggtgggctttagaagtgtgtgtaaatgggaggcgggaaagtgaggccggagactcatcatcactgctctccaccctccagaggggactgcggaaagcgcagccagccatcggcctgttgacaaggcactggcagtcactgaaaaattcttttcctttctctgtcaattagcaaatgatggtcttctactgataaagtttaggaataaaggagaaagaggaagatggaatcctggaccactttcagcctgcacttgagtattccttatgtgttctcctgactccctggtgccactaccccctgccaccgtcggccctgtggcagtggggcccttccccccgccagcctcggcaccgcttcagtgtggctggtgcctccaccaccattggtactgtgtcagcattgctggtgcacctgccaccgtcggtccctcatcagcattgcccatgcccccaccaccgtcagtccctcatcagcattgccggtgcccccctaccaccgttggtcccacatcagcgtggccggtgcctccaccaccgttggccccacgtcagcgtggccagtgctgcgacccagttgctggctggaggatggctggccactgttggagctgctgatctttccaaggccttgtcacagtggccatagatctcaaggtgcacccaggacactcaggaaaccagcctcttggttaggcagctgaggcctcacttttctgcatccatgtactcctttggtatctggatcttccttttaaactttgactaacacgtgtggcagaaccaatcaccaccacagcctgcaagtgcactgaggacctgtcaggcccaggggaggtgcagcacgctcatgggggcagcccagcactgcccaggtggctggagcgagtcacggggagagcagaaagctttgggcgtcctggctgactggcctcttagtgagaatacagaacagctcctggcagcactttcccttccagctttcctcaagacaggccatgccaggcgaagaggaagggcaaggtggctccctccgggtatggagatggggtgagcctggggacagtggagcctctgagcagaggactccagaggctcagggagcagcagagccgcccaagatgatagacaggagctgaaggccagaggggaccacgcctggagtcttggcgggaggagcatggacacaggaccagggagggagccccagaggcagtgccgaccatcctgctaaacacacggaacggcctccccattctttcccctaaagagtaggggcttgggccaggcacggtggctcacgcctgtaatcctagcactttgggaggccgaggcaggtggatcacctgaggtcaggagtttgagaccagcctggacaacatggtgaaaccccttctctactaaaaatacaaaaattagctgggcgtggtggcagatgcctgtagtcccagcaactcaggaggctgaggcaggagaatcacttgagccccgggggctgaggttgctgtgagccgagatcgtgccactgcgctccagcctgggtgacagagtgagactctgtttcaaaaaaaaaaaaaaaaaaaaaaaaggcgggggcttggagaggagaggaggggtcctggttttgttgtactttgttaatatagaccagatttcggcagattgcactgtataaagaaaaataaacatggacagaaaagttgtatggtcaaaattgaagtagcaaagccttctttaaaagttgaaattacttttgtttctttactaaagcacaaagtctagttgcagaatatatgtctatcttagcctgctttaagaaaaaaaaaaaaaagcggctgagcccaggggctcatacctgtaatcccagcactttgggaggccatggtgggaggattacttgaggccaggagtttgagatcagcctaagtaacatagcaagactctgtctctacaaaaataaataaaagactgcagctgcttatattaaaaaaaaaaaaaaggccaaagaatgcctcaaagcattgaaataaaacttactgatggtttcaccagcagaacagagacattggccactgtttaagctgtgctagatgataaagaaggccatacattagtttcaaagtcagagtagacagaggcggagggtagataggtgttagcaggatggctctcacggacgtgctggggccacatggacagtggacccctggatggggagggaggaaggaagggcctcggacatctcctgatgtgaagaatcctgtgttctcaattttaacctctttgtttctagccaagaagtaaactgaataacatactccacaccagaatggtttcacttagctttcgtatctcaggaactgggcttcagttctgcagtgagaactgtcctttaattgcttctcccctggaggctgatgtggtgacatactttggagcacagggcatacaggcatccctgcacgaacggtaccaggggcttgggatggctgcagcacattctgctggggctttgttttccttggggctatgtttgttttttctttttcccttctttcttactgtttcttttttctggatgcattatgttctttaaagactagtgattttccacaccaaattattttagaaatttcagcattatatggcagttttttttttttttttttttttgagacagggtcttaccttgtcaccttgtcacctatactggagtgcagtggcacaaacacgattcactgcagcctcaacctccccgggcccaagccatcagtcttccacctcagcgtcccccaccaacaagtagctgggaccacaggcacatcccaccacacccggctaagttttgtatatttcgtagagatggggtctcagcatgatgcccaggctggtctcaaactcctaggctcaggcaatcctccctccttagccacttacaggtgtgagccactgtgcctggcctattttaaaggtgttttttctttctttggtttcggagagaaatcagtttcctgtgtatcttaagctgtgtggatagggggattgtgataatgggtcattattttataattttgctattttaaatgagttttaaaacctgtagccagtttctgatctcagggaacatacctattaactcaaggtgttacaaatatcttgacagcttaaaaattgagttaagatatgaaaataagatatgaaaatatgaaaatactgtgctgtaatacaagaggcattcattaccttttccctgcccatcagtctcgacaggataactttacacttgacccaaagatatttaaaaatacatccgctttctttgaaacttctgtgtcagtgtttttcatttgaatgattaacagaagcacattggtttgtaggtaaatagtaaataggtaattctacttgtttttctaatttttaaaatgctttacaaataattattaatgatactgtatgattaaggaaagggaatttgtatgaagctaatttgaaggtaattggcttttgcatttatttattcatgtatatatttaattcgcatctgttatgtgtcaagtatagtgcaggagtcagcagaaaaagtaattcctaaaatcatggctcttgaaatcagttatttgtctttgtttttcctcctcaaagattactccctgttcagtcttgttaatgtgatcagagatttatattaacttttaagatctcataatcccaataatgtaagatatagtagagatgagtagagaacagaacttaaaaaaaaaaacaaactgtaattactaggaaattgactctaccagggaaattaacagacttgtccaaaattgtccctgtagacagagagggctggtaaggctggaatgaacccgtcgtaatttgaatgcttaaaactttttccattttattgtcaaaattattgcctgaacttcctttttctcctcatttgcctatttcccttgctttttatcttgtgcaccaccagtatacaacatagtggtgtttaactacttcctgaaggcattattagtcatcaggaacaccaggtcattatcgaagtagataaatgggcattccgcccatcgactaccccttggactaatttggaaaatatggttccttccctcagaagaaacagcccatgctcctctggacacttataaaatagccatgcgcacgtctctgttccttctgaacaactggaattaatgtgtcctgcttgatgctaaactggagtttaattcacaatggcaaggacgcttcacctagaatatctgtccatgtgaaaggtggggagcagtgcagcttccatctccctgtctgttttttggtgggctttcagcttttctgtcccatgactgttagtgactgcagcgtaaccccaaatctttcaccagatgttgtctcaccatcttaaggaaagaagaaagttctaatggatgttttgaatgtgctcgacttttattttgttcagacccaaactgaatgaggcagaggttaaaatcttttcttgttccatctgagtaagcacgaaaacctatgatccttaatcttttagaagaaaaataacccttctctgttagtgggatttctgattcatttcttctgccctgctcccctgctctgcatttttttagtcaaatactgtctggacttttgtgagccaataacctccctcctcacctcattcccctctcttcccctcccctgtgatcacacaaagagcagagagccctcaaaagcctgggtttctgggttttgtattttaaagagaggatgaaatacttgctgtacttcaaaacataaaaccgatctgttaaaactttcccaaaagaaactgattggcatcagcatagggggaataagaaaagtaagagaaattgagattaaaaaaaaaaaacaaaacggaggagaatgtaacgttggccattgtaattcataccaaactgactttcctttagtgcaaactagtaggcgtggcaatgacttcaaacctcccaagttagggagccctgaaatctttctacttactgatatctctgaataataaccagggcccatacacggggctgggatttgatagtcgaggccttcagtcctaaccattttgccctgtaacttagatcaggacctatacatttatttgtccatggctacacccatagacatatattctaacgcaggggccatgaaccaaatcccatgtactgcccatttttgtacagccttctacctaagaatgagtcttccagatgaatgattcgatgatagggaacattacctttgaaccccagttaagcaaaatgctgttccccccaaaagatttccgttcttctcacaagtagaactatattactatagaagtctactataaaatatagtagaactatattactataaaatctacccagttttattttgaatttcaccagtaaaaaaatttgtggaaatttgtgttctcacttgctataccagcgcatatataacatcttcccatttgtctctcagcccgcaaagtctgcagtatttactatctggccctttcagtcagaagtttgctgagtgctgctctaagctgtcacaaatagagatgattttgaagggaaaaaaagatattctcactatcattctttgtctttgcctgaatctctgttttagctttttgttgttgttgtttgtttgcttgtttgtttttagaggcagagtctcgctgtgtcacctaaactgaagtgcagtggtgtgatcatagctcactgcagactcaaactcctgggctcaagccatcctcccgcctcagcctcctgagcagttaggaccacaggcgggcaccattgcacccagctaatttttaaatttttttgtagagatgagatctttgctatattacccaggctggtcttgaactcctggactcaagtaatcctcccacctcagcctcccaaagtgctgggattataggtgtgagccaccacacccagcatttttttttttttaagagtgaagtttctctggttaatgtgaatgtgagttaataggctctggcttgtgcagtgcagtgccctgagaaaactgatattaattgtacagttgtgaaatgtggtataatattgtcaatagcagcttgtttaaaaaatttagattgcaaaataaaataaacctgtgtttccatatataaaacaggcagcaataatagtacctacttcaaaggactgtccaaaggattaagtgagataatgtaaataagggatttaataaatgttaaagagaaaaaaatctaccattgagaatatgtttgtttgcacaagacttggtacctttatcttagcatactgtatcttagacagatacagtatccctaatacactgtagatacctaaatcatgcttctcatcgatttcagttaatacaaaatatagtcctatatctcttttcaacacaattctgattttaaaggaagggtcttcttaaaggaagaccattgtttgtttgaaacagaattactatatcctatacgtttcttttcttttttttttttttttttttttttgagctggaatctcgctctgtcatccaggctggagtgcagtagcgcaatcttggctcactgcaacctctgcctcccgagttcaagcgattctcctgcctcagcctcctaagcagttgggattacaggcacccgccaccacgcccagctaatttttgtatttttagtagagatggggtttcaccatgttggccagggtggtctcaaactcctgggtgatgtggccgcctcagcctcccaaagtgtggggattacagtatgagccaccgcacccggccatcctatatatttctaagataaaattttaaagtataagtaaatctcattggagagcaaaagatgaggttttttttttggttcagaaaattttaggataatggaggtcagtgttttgctaaccatctgtaacaaactgcagcattggaaagggacactgtcttggtattttgaagagctaatatttatgcctgggaatcctctacctgcatgaaatcggcaggtaagagttagaaatatgcatgacattttcaaggaaaaaaaaaatctgtggtgccacttgaggagatgaaatctatggtcctgcctgttttcctcactctgtggctcccagaatgcatctttgactctggagtttgtccttctccctccacggccagatttcactgtcactcctctgagaaccctctccactgccctcttatgctgaatgagcccctccccaccaggcttcaggccattggtttctaccagtgttcacattttttgtctgttgccttcgctggacctcaacttcccccaaggctgaattttgtcctcattttcatattgccagaccctggcttaggtgcccagtatctatttgttgaatcaatgaaatactgactaaaaattgtctaacactaaaataaaatgaaagccaaaaaaaaccctttagatttttctttcttttttagatatagacaatatacatagataatcataacattattttagtgctgattaaaaattcacagataagcccaaatttatatatagcttgtctgagggttaagttctgaagaatatggggggcatcagagagttgatacaaatccatctttattttctgcagggccagctccttagcccagcagcagctccccggtccccctgtaagtgtgtttcctagatgtggcaaaatgcctgccatggtgttccaggcccaagtgtctagctcatggaggtcagaggggaaggggcaagtgtcttctcagccacagtcgctgttatcaattgggcttcctgtgcacgaggtgcttcgtcaagggttttacatgtatcttttcattgacttctcacaacaatcctattattatatccaactcctaatatgaatctgggatttaaagaggttaagtaacatgcttagggtgtcaccaactccaggtgtgctgggttccaaagcccatgctcttcactgttaggctttccttacctctcacctcctttccagggaagtggcaagatttttggagctggcgagtctggggactcatgactggttgtttctccttgaagcatagactagaggagtcatgtgcgcaagagtgttgttaatcactatgctttcccctcctgagctcaagaaaaacagaactgtcaagagttaggaattgcgtcctggtcaccaggttccttgtttgtcccatgacccagagtggagtcatcccaacagagatgtgctaggctgtaagctgaatgtgataagggaggcaaactgcaccacagtgaagtcctccaacttttagaagaggctagctactgtgcgcgtcaattttttctaacctttttttttggtggcttatatgcaattacatacgagttacatttattgagtaccacatgcaggaagtcccaggcaatgagaaatgagcttcatggtaattgagaatgaagttaaggaagaaaattttattgttaatcaagggcttaattgcctccgggacattttaaataaatgccatgcagtacttaaggagcaatgttctgtaagtgagatgcaaaaattctttaattaaaccatggtgggtattccctgattgaaatatctgcctttatcttaatatttaaaccttcgtgattcatgtaacaacttaattagggatggagtaaattaaaggctccttgaaagaaccaatcagttgtataaaattggttaaaagtatttctgggataggcttctgtgtatttgtactgatcagaacatatctttggttcattttatgtttagctgtcatctcgagtaagctgtatttcagcctgtaggggacagatggtggctatggcattgtatagggcagacagttattagaatttgtctgagaaatggatcaaatgtaagggtttcttggccactgagaaaggagacatttccccagatgatgacttggatggtacctgcaattaaccaggtaggaggctgccaagtctgttcgttggtcagtcagtcaacacacctgagtgcagccacggaaaaggccttgtgctcaatggtgataagcttgtgtcagtgtcaaactaaacagacccagagattcaaggggacttgccagcctctgattgtacatggtaaaaaacaaaatggaaaccccgaaaacttaggtattcaaatgtttagactttactagatcactcagtttatgagtggcagagatgcctggtgtggagctcgataaattcttgtgaaaagaaggaaggaaatgagaatgggggcagttgcctgggaggagggagggggacaaggcttgcatctgtcactgtactgcacagcgttccctgactagttggacactcagctgtgactctcgtgctgttaacagacattgtcatgaggattcaaaaagtgcagggaatacacatcagtggctctttaaaaattcagggttggtgtgttttgccaagctaacattgtgatttcatttaatccttaaaaagagtaaaattgttctcagaagataccaaaatcttaaaacataggatcatgtctgtttttaaaaatttatttagctcaaataagcagccaataacaagatgaaatagtcatctaataatggtgttttataaatggttttatttggaaatttttttctcctaatttcagtgttcgtaatatgaaacagtcaagccctttaaaagggattgcattttcaaataaacacacttagacacaccgtgtgaacttagtacttgaggaaaggaaatgaggggaggaaaggaaaatattttaagtcatattttcatgaaggactctgtggtattcaacacgtgttggcagactctggccaggctcaaaaatgatgggtcgcgttctgcctactgttttaggaccacactggccagggtgtcccccaaggtgcctttctgcctctggaatccctgttacgggcccacggaaagcctgtggatgcccaccagctgctgaggggtccctgtgatggtttagatctgaaatcatactcagttctttggccatgttctggaaggctagaattgttatgtcactgtgagtatggaaatccctttagtattctacatgataattcagagcaattaattccattctaatttccatgccctagaagaactgtacttgtggccgggcatggtggctcacgccggtaatcccagcactttaggaggccgaggtgggtggatcacctgaggtcgggagttccaagaccagcctaaccaacatggtgaaactccatctctattaaaaatacaaaattagctgagcatggtggtgcatacctgtaatcctagctacttgggaggctgaggcagaattgcttgaacccgggaggcggaggttgcagtgagtcaagatcgtaccattgcactccggcctgggcaagaaaagcgaaactccatcttgaggaaaaaaaaacaaaaaaacaaaaaaactgtatttgtaaaaacctgaacaaagactatcatatctgcacaaagtctgtgaagaaaggaaaatgagccatgtgtactccagagcaactagctgcttcccagtggccataaatatgtcttgtttctcaaccatttccaaatgcttcaaacttaaagaaatttgtacgtgcccaggaacgctctatcttcgccttctctggcattagttctatgattctttaatgttgtgggagatatttatgaaatcatttcctctgactttagtgactctgcctttgagagctcaatggtaaatacacaatcagcatgtgtgctaagaggctcgaaagtctcatgacaaatgctgtcctgtaccttgcagggcaatgatgtctgtaagcatctttccttaagcacccactcactcgctggcttggatacagtgagtctcaagacatcttaagaaaattgccatctgagcatcacgctgcaggatctggtgttagatatttttgtggctacgtgggttcttactcatttcccctctccgtctgtcttgtattttctatgtgccggtcttgccttagttcatatgcattcaggagaaggtatcattagcgacttgacgcccatattatgacttaacgagctggaaagtccacacgtatagattctgcatctctcaaactgagatttttgattcgtagacaggtcgcccgtagactcttcccagaggctttggctgcttgggacacagattgtaatcacagtaattagcactgaattttcaagtcctgctctccagcttgacctggcagcatttaacggcgtgcacacagctggatcaatggcaggaattgaaggacccagttgtggggctgctcctggcagcctgtgatgggcaccgtccctggagaattccaggaaagcatcagggacaagggatggtgcagggacctgggtgcgaaagtaaagaaatatgatatttataaagcacctgtcgatgggaatcctgttcaaaattgttactggagacaaattgaagtacagacttctgcctgaaattcattatcaatgaattcatttttctccttcttgcttagttcagttttgggtatttctaaaatgttctttgttaaagtttacacttcctttccctaaaagaagtacttacagataggaatcttaaagctagtgggaaagaactgtaggacacaaaacagatacttcagtggcacaaatggggcaaagaagcacccatgcctgttatgaagtaaattctctaggaagtttggtggtgttggggagtcagggacttaagctcagataagccagaaggcactcctctgtcacccacttcttcatagtcccagggagtgtgtcaccttaccaggccactagaaggagagagtgacaagaacatggcagtttggcacggcagaccccaaccttcatccatcgagggcttgtgattttgtggggatacttgaaggctgactgctgaataaaaggtttaaacttacaggaaatacctctcaacacaaaaccatttgagcatatgtatcttttttttggggggtgggggtcgggggacggagtcccactccgccgcccagacaagagtgcagtggcatgatctcagctcactgcactctagtccgcgttcaagtatttgtagtagagacggggttttgccatgttgcccaggctggtcttgaactcctgacctcaggtgatccacctgccttggcctcccaaagtgctgggattataggcatgagccaccgtgcccagccaagcatatgtagtgtctctaaccatatgatcaatctagttgaaaaagcatggtaggcagagttttacaatgagagcttttttttaatgtttagtttccttagggacagaaacattattgttccattctaccattctgcatcagtagttcgtatgaggttgtacttttgcctttgtcacttgtcagcatttgcactgacttaagttgttagaatatttatgtggaaaatgagggcaattctgtgtgtaaatatctcacttgacaatcattttatgatttgaatgttcacttgcaatgagaccctgacatgttcacacgtgctagttttcagctgcaattacatttgccactaatttgtaccttggaacgtgtttactgaagccgctatggagcactcggttccgggagccctttcactcatcaactgcttctaggtcgcaccttgcactgggagaaacctggtgtctttctggaaaattccttaccattcaacagcttacccagtcatgcatttagcactttttcctgaaattctttcataaataagcaggaagccttctttgctatttttattataaaaggggaaatgaggataaaagttacacatgttgttattttaacatctagtcttgtatttgttgaagagttacgcttttacttaaaaacaaaaccagagacttatgcctgttgccagcctctgtcaatgatggctcttcattcttttaaagttcacagcagaaaacactgtgttaagctcttcttggctttaaaagccaaattagacacccaaaagtctcagcactttaaaatcctttaaaagatgatttaagtaaatcactttagaaatctatgcccaaacttttaaaaagtacttttcacatcttgcctttacaagtaactgtggaattagacacaccataaatgtactctgtattttcttaataagtttgaattttcggaaagcctttatttttatattatagagccaacacggctgttggatgttgaagagacccagccaatattattacacatttctttcttaagtgcagaacttggattgggacagggactgtttggtttggaaaacatcatctgttttccttctcctcctcctttccttctgtgtttatttcatttggtggctgcaagttgcaggtttttttccacttcacacttttgctagccctcttcttttcttctgctttacaatttgcactagaagagggtagcgggctttttgtttgggttcgggtttttttctttttctttttcttttttttttttctttgcatcttccttcctttccacagagagattgctgctgaccaaatttaaaacactacagtgtttaggatccctgcagggccattttaagtatttggagccataaagggccccaagccataactacctgaattgcttttaattacacaatatagctgcatcattttacttcagattctttttgattgatgctgcagggcaattgtaaccgcgaatgatgggattaagtgcctcttgaagtgactttagcttcttgtgggaacaaagggaaagaggagaacacttagtcccttttttgcctgagctgcctttttcttcacttgcgtataaagaaatacaattaacaaacattatccccagaggtaaattgaaatgtacatgcagacaagaaccgctcttgactgcaattagacatatatgatctaaggtattctggccattcattagtgctaattgtttgagaaacaagcccagaacaaatgattaaaatgtaggcgccataactgggattattagcatgtgtgataaaatgcacactctgtggctgtactgaggaaacgctttggaaagcagctgtgatttgaagaatggttggttcggctctgtggtgagctctcttggtgtttgctcaagacctggtggtgtttataacaaacaacttacatctttctttcttaattagtgggaatcacaatggtattttgtaatttaattgtaattacaaaattgtaataaattgtaataaattgtaattacaatattggtattttgtaatttaaaatcctatcgctttcctgcgcctttgggttgctcctgcagtctagcggtattgcggggactcgggataacctgaattcttagattttgcttctacactccactttctttttttttctcttctttcttttttttttttttttttttttttgagacggagtttcgctctgtcacccaggctggaatgcggtggcgcgatatcagctcactgcaagctccgcctcccgggttcacagcattctcctgcctcagcctcccgagtagctgggactacaggcgcccgccaccacgcccggttaattttttgtatttttagtagagacggggtttcaccgtgttagtcaggatagtctcgatctcctgacctcgtgatccacctgcctcgccctcccaaagtgctgggattacaggcgtgagccaccgcgcccagctacactccactttctttaaaatgttggaggccagggagaaccacttgaaagtttgctcccttatttgacttttgaatagttactcatcacacctacactgtagtgtgagggaaaagttctgagatatcctctggcatttggaacttctcttaccatacagagacctggcaggggtgacctagtcagacgtaaaccatctgggagctggctggtccatctgagcggccagcagtctgcagggttcttatgactgaagggactggttttgggatgtgccaccccagacctaaaatcgctaagccctctaggacctgtacaagtggagaacgcctaatccaagttaagtgaccaaaggagtaagcaccaattcagagagatagatggcgattaaatttcctatggaaatgcatttaggagctgggacctagcactcagtgagagagatgggaggtacccagggcaagggaaagagaagatatgagatgaaagaggaacaaaggagcaatagagggctcaatggggagtgtgctgagcaggcagaagctgcatcccaggtagtaggtctgtctgctactgggtgcttcagggctccctatttggagctcagtgtttctctgtcctccacctgcattgctgcatctggagtcacaggcaggaccatttggagattgtccatttggtgccatgaaaacctgcaacaacctttcaatctcaagtgagaccacttgagattgtcacccaacatacttccccagccacctatcccttagcatgtcattagcacattccaagggaagacaaatatcagcgttagctagagaggatataagattaaatttgcttttaaagtcagctaccaaattcaaaagacaagcacaaaagattttctggttctctccatctctaactgacctattctgtctttcttgccattgttacagaaaatggaattaagtcacaaataaaccataacatagattattatagacatacagctcttaattttcagttttattctttttgtatttacaagaaaagtgttactctctgaatttgaccagttagttccactggaaactaagtaactgtgtatattccataagagtgggtttggcagggagctgaaaataaaggggaaagaaactgttttgcactttaaactggggcattgctgtgtggtactgaattaagaaaaaaaaatattaagctcccttaaaattagaggaagttctaggaagtcttaccttaaatagatatttaaaggaattagtgcttatagcacattaaacatacttcaaaaacaaaacccaactatgttagaaaagccttcacgatcacatccatatgtttagttttaatttgcatcacacttagctctgaataattaagaaggaaaaaacaatcttaatcttatcatgggtcctatacaatcaaagccacatacacgtgattcgtgatcacagcttgtattcacagctttcgtgtgtgtggtatgggtctggcaattagactcagactgtgtttttttctaaaaattattcagtgctagagagtgatcaatattaaactctcccaaaaatgtacaaatcagaataatcaagggactgtggctaaatagaaaaaaaaaaagtcaaaattctaagctatgtaacattttggcctcatttcattgagattgacacttgaaaggaatttttgagagaatctaggatgaaaacggagatttcattaacccaggtcattttcatgacagttaccaaaaaaaaaaatttttttcagatgtgggaagaactattttctcaaaattgcagagccattttctagaagaaaaaaaaaatgctcttccatgattactttcatatcaaagtacccagtcttgggggagatgcattaatttgacacgtttagcagcctttgagcttttgaaaaactctgtaaaagaatccatggttacatctgtcaggttgacagtctttcgtgacctttaaaaaaaagttaaggagaaactgatctttttagttcacatttgctcagttacctctaactgaacaagctaggaaatagtcatttcagctttaaatactatttttttttttttttttttacatagaatcaccagtactaatggaatctctaaatggaagagtttagtggatatttctggtggtctcatggtaatgatatgtcctgtgctcttcactggctatttcaatacattagctactaaatattgtcttttctgcacctgtttttagaatcagatctccttaggaagatcaacagtgggcattctaactaggggcctctgctttgaatgttcctcattggccagtaagggaacaagtttcttctttgttccttacacacagagttccaggatccaaaattattaatgatctctacagaggcaaagagaactcaggctggcgtgtcctttctgttttaattacaatttaccaaatcctcccatgtcatgcacttgacaggtgctatacctcatagttcccaatgctgggattacacttggaaatccatctatcaaatctctttgggtagagtcctgagcagtcattcttggaccaagttctcagcgacattaacagttaactattaatgaacaacatcctttgactcctttgtgtttccaggagcccctgctagaagcagcccagaaacagaagagatgctaatcgcattgtgtgcctgaacgtgttcagtgaaggagcgcaggtttccctcttgacctcggagtcacggcaggaaaaaaaatccctccagttttccgtcagataaaacctctgctcctccttctctcaccaaaagtagagccagaaagtgggattaaggcaaatacccactaacaggcacatgcgccattgtcattccctcttccacacaaaacaaggagctttgcagaaaaacaaaaagctcctctcctctcccccccgccccacccccatgctccctttcttttcctcctcccctcctccttcgttcctaccctcccactttcttatccaccccggctttccctcagctgccccccttctcctttttctggttttctctctcacctgctctcaaatgccctctcccccgccttcctcttcctccttgcctcctgccgctctgatttaggccaactctttcctcatcctcatcctcctttcagaaaagcgtcagtgtttaccctcaaaggagctaccgggtgcccatgtgctgtgaggtggagccactccgggagctgccacggccacatttatagaaagatgaacccacacgggagacaaacggggctctctctgttttcatggaaaaactgcccttttatttgggattcatgaatggtcaccacagtggtatgggtcttcctgttcctgggacttcgctgacataagccatgcacctgcctggacaactagggctgtgtggcctcacaaggcagattcagtgagtgacaacaaagtgctaacagacagtagcttctggtccgtgtttgtacagcctaccttaggaggccttccttagcgagggccagcgtgtggtggactcaatatttgttgaatgtgtgttttatcctgaatctgatcaatacgtttttgtttatgaaatgatagcatggatgtgataaggccaatagatggggtaattttatttttttaattgtggtaaaatatacataacataaaatgttaaccattttcaagcatgcagtgcagtggcgttaaatagtacattatgattattgtgcgaccatccccaccacccatctccagaatttttcatcttcccgaactgaaactatacccattagacaaaaactccaattctctgctggccgcagtggctcatgcctgtaatcccagcactttgggaggcccaggtgggcacttgaggtcagaagttcgagaccagcgtggccaacatggcaaaaccccaactctactaaaaatacaaaaattagccaggcatggtggtgagtgcctgtattcccagctacttgggaggctgaggtgggagaatctcttgaacctgagaggcagaggttgcagtgagccaagattgtgccactgcactgcagcctgggtgacagagcaagactctgtctcaaaaacaaaaactccaattctcccctggcaactatcactctagttttgtgttttttttttttttttttttttttttttgagatggagtctcactctgtcgcccaggttggagtgctgtggcacgatctcggctcactgcaacctccgcctccccggttcaagcgattctcctgcctcagcctcctgagtagctgggattacaggcacctgccactacacccagctaactttttgtatttttagtagagatggggtttcaccatgttggccaagctgatctcgaactcctgacctcatgattcacccggcttggcctctcaaagtgctggaattacaggcatgagccaccgcgcacggcctctagtttctatctgtatgaatttgatgactgtaggcacctcatggaagtgagaatcgtagaatgtctgtcctattgtgtctggcttatttcattcagcataatgaagaactttaatttttgacatggatgcttgtttgctctctcattctgtgtgaaaaaagacttccaggcaggtcgcctgtaatcccaacactttgggaggccaaggtgtgcggatcacctgaggtcaggagttcgagaccagcctggaccacatggtgaaaccccacctctactaaaaatacaaaaattagccagtgtggtgtctggtgcacctgtagtcccagctacttgagaggctaaggtatgagaattacttgaaccctggaagtggaggttgcactgagccaagatcacaccactgcactgcagcctgggcgacaaagcgagactctgtctcaaaaaaaaaaaaagaaaagaaaagaaaaaagacttccgtcattgggacacttgtaggaacgtccctcgcccctggtgtcccgatggtctgaggaggcagtacgctgcagtgagacagtataacgcaaactttactaaaccggacaagaataaggattctgcttttttcttgactcttgccaagcctgtcctttatctgatgtccaacccttttcatgggtttccatgacaaatagagtggccagggtagaccaggagggccgttccttcccggtgcccctgctttgtaccaggaaccccacaatagccagaaggctggcctaggagttgcccccatcctgtaccctgagtccttccttagaagcaaagccatggtggaccacaaactggcttcccttgtgtatctgctttgggcacaaaagaccatgtcttcatttcagcacaaaacagtgcacttcattgaggtgtgatataattgcttcaggagagagtttgctctgaaaatgtcttctcggccttcctgaagcaggctgcacgcttatttatattggcaccacatgctaatctcacgaatggccctgttccgccagtgggaggacaaatagctgttcttttgctcccgtgtccatggaaagctcccctttctccttgcatggttgccatagtaaccaaaaaaaaatagttcttcaaaatagggaaggaatctctcagggtacttgggaacttagcaaagtgagaacataagtaggcctcaattatcatagatgctggtgtaaatacctagttattaatagtcaaagcgggttgaaattggtaggtgaattttgctgtcacttaagagagtagggaaagatgggtgaataggctcttaccttcactcagtactacagattcttctgtaaccattggaattgccagacgaggtcagacccacaggccatacaacacagaatttagtttttgttggcacagaacagagaaagaggcagtgacagagcacagttatgctcctgcgaccccctcagccccctcaaaggattggagatacagcgctaagtagaggaatccattacgaatctgtcatactgctgtggatatgtgcacacttttctgtaagaaatttttattttcaacctttatcagcccttagagtcaaaatctctttaaaggagctaaagggccacagcatttttgtgtggtattctacatagaaatttactgatggccaggcgcggtggctcatgcctgtaatcccaacctttagacaggtggatcacacaaggtcaggggttcgagaccagcctggccaacatggtgaaaccccgtctctaccaaaaattaaaaaattagccaggcatggtagcaggcacctgtaatcccagctactcgggaggctgaggcagaagaatcgctggaacctgggaggcggaggttgtggtgagccgagatcgtgccactgcactccagcctgggtgaaagaaggagactctgcctcaaaaaaaaaaaaaagaaagaaatttattgatgtattatttttaaataatgccctctttttttaaaaaaaaaatcttatgtttaagaacatataagaacttacttaaatttattagaaattgtggagacaatttccaaaggatatataaaagatatatctttttttctggttgtaaaacagctcttcagtggttactggacacgggtacagcttaaaaattttaaaaatatttgaatggaaatgtacgatgatatagccactgtggaaagaaatatggcaattcctcaaacaattgaacatagaattaccagatgatccagcagtcccacttctgggtatggaattgaagcacggactccaacacgtatttgtacagccatgttcgtagcagcactattcacattagcaaagaggtggcagcatccccagtgtccattgacagatttatggatatcaggatgtggcatatccatacgatggaatattattcagccttaaaaaggaagaacattctgacatacgctataacatggttgaagcttgaagtttttttgttttttttttttagatggagtctcactctgtcacccaggctggagtgtaatggtgtgatcccggcgcactgcaatctctgcctctcgggttcaagtgattctcctgcctcagcctcccaaaaagctgggattacaggtgtctgccaccatacctggctaatgtttgcatttttagtagagacggagttttgccatgttgaccaggctgatcttgaactcctgacctcaggtggtcctcctacctcagcctcccaaagtgctgggattacaggcgtgagcccctacacctggtgaaccttgaagatattatgctgagtgaaataaaccagtcacaaaaggacaaatacagtgtgattccatctatgtgaagtatttagagtagtcaaattcatagagatggaaagtcaaatggcggttgccaagggccgaggggaggagggaatggggaattcatgtgtaatggggccagagattgagttttgcaagatgaagagttctggagatagatggtggtggtgattgcacaacggtgagaatgtactcagtgtcactgaactgtacacttgacagtggttcagatggtaaattttgcattatacatattttaccacaatacaaaaatagtagtgtttcacatggtggggagtataaaatgatagcctatagatcagctcaaggtaggaaacaacgatcttaaaatgattcatggattattgttttattgctgttcaaatcaggaagttataaaactttccccagggttcagatcgccagtccctttccacagttacctttgctcactacacacattccaactcacaacacacacaacatacaaaaccctgggcgtagacagtgcagagggccacggatgggagagcaagccaggcactctcatatgccgctggtgggagtgtaaattagcacaactccattgggaagacagtttggtgaagccgacggagagcattaaataatcacactgataacctttttagccctctgaggacagaggctaatggaaacttgtggccctttctccttgaacattccctagcctgccacccagcctagcttggagtccattctttcattcattcagcctgcatgtgccagacatggtgctgtgagctccatgtatggctttgagccaagcagaccaagtccctgcccacagggggcctgtggcacatgggctgtggagttgcacatgagtgataccagctggggctgatttttgcagaaaaggaatttctgggaggctggtggacaggctggagaataggaaaatggacagtgaccaaactaagctcctaagaacacagcccagcccaggccagggcagtctggccagggtaaaccagactgtctaccctgccccctcctgctgctgtcctcctgctgctgtccctgcgctgctgtcttccctcctgccatcctgggcacttgctgggggcacctctttccttcaccggctcccaccttctttgtgtcaccccctcatggctcaaaggccccacctgcagtatctcatgggccaagcttatgcttgtggcctctccctagctttcaaaggatgtggagaaggaccgtggggtctctgcctccacccccaccaaacaggaagggtgttcctgtctgggacagccaaaaaggaaaaattctctgaacccagtggaagacagacagtgaacaagtaaacaaagccaataattcatttcaaaaggggaaggcctgtgaagggaagggcggggttctggaggacagcatcccaggagggggcatggggaaggtcctgctgaggacagggcatgtaggctgagccttgagggatgagagggtggcagacatgctgagatccagaagagccttccagagagggaaccacttatgggatggtcccgaggtgagcaggaagatgtggtgtgtcagggaactggcagcagatacctgtaactgagggtggtaagcagaggagacggatgggccaggcagccaggagcctgccaatctgggtgagacatttggtttttaatgtgagaacactgggaagccatggaaggggctcaagcagaggagcatcatgatttgatttgtgttttttaaagtccagactggctgtggtgtggagaagggactggagagggacagaggccccaggaaccagtcgggagtaaggtggtggtgtcttgggccagggtgggaaagatacagtgcagaggtgcgtgcaaggcacagttaacgcccatgtatgttagctctccagtttgtaatgtagagtaggatgtaagtcccatcctaaaggccctggcagggagctggaatgcatggaatacctgattgatactgggtttgattagtacgtctttaaaatttattgatacatttacctacatttattaaaatgacttagaatttattgtgctgttagagttattattttagtggcaatctctttttaacttcattttgaatttaaagagtgatgttatgactttctaaagccctgaaccaagttattttctgcacttagtcaagtctggactgctacttatatgactcaaaagtattatgacattggccgggcgcggtggctcatgcctgtaatcccagcactttgggaggccgagacgggcggatcacctgaggtcaggagttcgagaccagcctggccaacatggtgaaaccccatctctacaaaaatacaaaacttagctgggcatgatggcaatgcctgtaatcccagctactcaggaggctgaggcagaagaatcgcttgaaccggggaggcagaggttgcagtgagccaagatcatgccattgcactccagcctgggcgacaagagcgaaactcggtctcaaaaaaaaaaaaaaaaaaaaaaaaaaaagtattaggacttggccgggtgtggtggctcatgcctataatctcagcactttgagaggccaaagtgggcggatcgtttgagcccaggagttcgagaccagcctggtcaacatggagaaaccccatttctacaaaaagtacaaaatttagccgggcatggtagcacgtgccagtagtatcaggtaatcactacttgggaggctgaagtgggagggtcacctgagtcagggaggtggaggttgctgtgaactgtgattgcatcactgcactctagcctgggcaacagcgtgagaccctgtctcaaaaaaaaaaaaaaaaaaaaaaagaggagagatggagtctcactctgtttcctagactggtcttgaactcctggggtcaagcaatcctctcacctcagtctccgaaatagctgggactgcaggcacacaccactatgcccagctcttctagatgatctttttttgttgttgttgtttttttttttggagacaaagtcgcgttctgtagcccaggctggagtgcagtggcatgttctcagctcactgcaacctccacctcctgggttcaagtgattctcctgcctcagcctcccaagtagctgggactacaggcgtgtgccaccatgcccagctttttttttttttttttgtattattagtagagacggggttttaccgtgttggccagactggtctcgaactcctgacctcgtgatccactcgcctcagccttccaaagtgctggaattacaggcatgagccaccccacccagcctagatgatctctttttttttttttgagacggagtctcactctgttgcccaggctgaagtgcagtggcgcaatctcgcctcactgcaagctccgcctcccaggttgacgccattctcctgcttcaaacccccgggtagctgggactacaggcacctgccaccacgcccggctaattgtttgtatttttagtagagacagggtttcaccatgttagccaggatggtctcgctctcctgacctcgtgatccgcccgcctcggcctcccagagtgctgggattacaggcgtgagccaccgcgcccggccctagatgatctcttttaagtagatactcattgttatgatttctgtcctcctcttttctgggccacagggggcccaggaggaagtgtacaaaccatgtcatggcagccttccctgtgggctccagtgaagttgctcatgtgtcttggcccttggtgactggtctctgatgccgtactaatggtcagtggacctgtgatctgttcttggggtacaggaaatgcatgaggtgtgcccagtgggtgtgatcatggccctgcagacagggcagctcctgcctcttctctccctgttgctgtctgtcacccaacaccagccagcctgttacctctgatatgggcgccctcactcctggactctgacagctcccttgcaggcacactgccaaagggtcagtcgaaacttctggattcttccatcctcagggaatggatagcatgccactgttgcccttctctgcctgagcaatctatattgctgtgtctgctcttctctgtgccccacgttgatgcagagctcccatgaagtctcccagagggtgagtgggaagttggcacaccccctcagtttggacattcccattgcctctctagtcactgtcactgtcctgcatgttcctgggatgggggagtagaccaggcagaaccttcagccctgtctcattacttgggctctccccaccgaaccgctgtcagcatctgaagggctttgtcttgcccgtgacaaggacttcacttcaaatcccccattcctttctcactctgcctcctaagaattctatgttcagacccttaagctgctggaaattataagacttcttctccactaacaaaggcacgtttattatctcactgtggacttgataccagaatctagcatgaagctcctagttcagcagggacttcctggtgttcaccccattctcacccctgcacttctacaatgatggccatggattcagtgggtggggatgtgaagcaacatgattttcaaacaagggaaacttctgctcatctcaaaattatcatttgatcagtggaaggttgtgtaattgatacctatctcccctgcctaaatgtaataggattaaattctggttactattaatgttcagcaagcccaagtcctttttgggatcggtaagacaccttagttgtacttacaacccttaatgcagagattctcatctttggctgtactttggagtctttctggtagctttgaagaagtgctgaggcctgggactcaccataagagtgatttaattggtttggaatgtggcctggtgttttagcccctaaagcaagcttgtccaacctgtggcctgtgggctacatgtggcccaggacagctttgaatgtggcccaacacaaatttgtaaactttcttaaaacattatgagatttgttgttgttgttgtttgtttgtttgtttgagctcattggctagtgttagtgtattttatgtggagccaagaccgctcttccagtgttgcccagggaagccaaaaggttagacagtcctggactaaagcttcccacatgatcataatgttcaggcaaagcagagatccttaaactagctaccagctaagtaaagaagccattcacttgggtttagaagtcatgtactaaattgtatcttcaaatggacatgcgcttctttgattactattgctattttgaattactgcagtttgaatgttattttattattttttttcagacagggtttcactctgtcacccaggctggagtgcagtgacgtgatcatggcccactgcagccttgacccccaggctcaggcggtcctctcacctcagcctcaggagtagtggggaccataagcttgcaccaccacaccggccaattatttaaaacatgtttgatagagacagggcctccatgtgttgcccaggctggttttgaactcctgggctcaagtgatccttctgccttgacttcccaaagtgctggcattacaggcgtgagccaccatacccggccaagtgttatatatttttttaatcaaaatacttttctttaaatatagatttttttcaagtttgtggaaacctgattgagtttcattgctttcacagcatctacttgtacataatggtagcatttgactcagttagaaatttttactgaggcaaaatttcttgcattaagacagtggctatattggcattcgctagtgcagctgccctccagctcagctgcgcattagaatcaccttggccacttttattttatttttatttatttatttatttcgagatggagtttcgctgttgttgctcaggctggagtgcagtggcatgatctcggctcactgcaacttccgcctcttgggttcaagtgattctcctgccttggctgccattgtagctgggattacaggcaccggccacactatgcctggctaattttttgtatttttagtagagtcagggtttcaccatgttggccaggcaggtctcaaactcctgacctcaggtgatccacccgcctcggcctcccaaagtgttgggattataggcgtgaaccactgcgcctggccaccttggcaacttttaaacgttccatagcctaggttttatcccagaccaattatgtcaaactgtctgtggctgggactctgccatcagcatatttgaaaattccccaggggactgcaacgtgccaccaagtttgaaaatgaataacctggagacatttatgtgatatgtatcacctggaaatcttgtctatacgcagattctctgatgaagaaggactgggatgggctccaaatcctgcatttctaactagctctcacatgacagcaataagagagcaatggtgctgacctgcagcaacagctcacttaagtggcaaggacctagaaagcttaaaaagcctgggtcctgttactaatgaatttaatttgatggcactgagtagggtccagaatttgacaattttgaaaagctccccaggtgactattatattgaatcccgggttgggaaccccgtcatgctacgggccagctatgcctcttgttatataaatggttaattaatggcatcaggtgaagggggaagggagacgacaaaaacaaggccaggtgggggcccccctctgggatggcatatctaaaaaaggtccctctttagagagaactcaccataaggctaccagattttttcaacgcatcttaagcccctgctttgcatattttttgaatacagttacatattgactatctagaggccctaattccaaatatgtaagataaaataaaacaagttccatcttgtcacctgctgcaattgtattcatacgctgtagacagtgctgaatacaactcaagcacagaacagattttggaacagctggggatgggggaaggagaggactcaccagcaggaagggaggagggaggcgtggtaaagccttccttctccggaacggtgactgccgtgactgggcttctgccacctgcccagtgacagcccccctccagaccacagagtctgcaacagaacctgaagccccaatcctccttatacgtttcttctttacattatttcaaacagttttgttgcctttgatcttttcccctagagcttgctcagtgctggccttgtgctgtcctgcctctgattcacaggctgttctttggggtgtccctctctgaacctctggggatgcccttttttgtgccacctcctgactgtgcttagcacagtgcagctcagggccactggatacagctgtgcagggtgtgccctagagagggcacctggtgaggggcacaagaggggctgggccagtcatgctctacactgtgctgcagcaggagctagagttgcctttctgctcttccatttgctggaaagcactaaggggcacctttttccagtttgcatgtaagtgctgccttgtgtgctagtggaggcccagagcaggtcacccattggtgcttactaagtgctcactgaatgaatgaatgcatgaacaaaataacaaaatagaggcaataaagataaataagaagctttcatagtcatttaggtcaagtttaaggaagccctaaactagaatgtaaatgtgtgatggaaagcaggggataaacagaggagcagaagcaacaggtggtggattggattaaggttcaaggatggcaaaggagagagggaataaaaattatctcctacctgtagtcaccagtaatgcttgactcttccacaagaagaacagggacagtggggtgcgggtgagttctacgcacccaagtctggagaggtggctttggtgaggcaacaagttaacaggagtgatgcacctctgatgtcaggccctgaaacaagcagtgcagagagatgtgagaccacccccaccccctcagagagctcatgctctaggtaaggataccagacacagaatttctggtgctgggctgtgtcaaccagcagcacccatgggtgacaagtgacagttaataatactatagtagctgtatctacctactacttgttttactcttcgggatgagctttcatctgtgagaagtagctgttatgttgcttctcattgaagaagacattgatgcttcctaccccatctcctgactgccagtcaaaacattaggttgaatcatataaaattaccattttgtaggtcaaaaatggtcaaatatcagcaatttcatatagttcagcttaatacattccactatttttgctgtttgagaccttttaaatgcttttattggcttaagtcaattataaaaggagatttttgattaccggttcaatctccttactagtcagactcgctatttatctaggttattcagattttctgtttcttcacagtttagtcttggaatttgtccatttcatctaggttattcaattggttggcatacaattgttcatagtactgtcttatgatcttttatttccatagaatcagtagtaatatccccatttccattgctgattttagtaatttgagtcttcttttttcttagcctactagctaaaagtttgtcagttttgttgatcttttaaaaaaatcaactcttcatttcattgattttctctgttgcttttctgttctcaacttcattatcactgctcttatatggcttttataattgcctatgcatttacctttactaagatgtttatttcttcatgtgggtccaagttactgaccagcattttttcatttcatgttttcatatacctttgggccttcatttcactctgcacctaagcatttcttgcagggcagctctactggtgacaaactcccttggctttttaaaatctgggaatgtctgaatttctccctcactttgaaggacagtttttccagacataggattcctagctgacaggtcttttccttttagcactttgaatatattggcccattgccttttggcttccaaagtttctgatgaaaaatctgctgatcatcttactgaagataccttgtatgtgatgatttgtatctctcttgctattttgaaaattctttccttttttattgataagagatatacatagtttcaggatacatgtgataatttaatacagtcatataatttgtaaagatcaaagcaccatactcaggatatctgtcactttaaatatttgtctattctttatgctagaaccatttcagttcttttcttctagctatttggaaatatacaatagattattgtaaactacagtcaccctactgatctgtttaacactaggtcttacttctttatcaaaccatatatttatacccataatcaacttctcttcatacccacttttcctctacccttctcagcctctggtaaccgttaatattttctgtctttgggggctggatgcagtggctcatgcctgtaatcccagcactttgggaggccgaggcaggcagatcacgagatcaggagatcaagaccatcctggctaacacagtgaaaccccatctctactaaaaatacaaaaaattagccgggcgtggtggcgggtgcctgtagtcccagctacttgggaggctgaggcaggagaatggcgtgaaccggggaggcggagcttgcagtgagccaagatcgtgccactccactccagcctaggcgacagagtgagacgccaactcaagaaaaaaatatatattttctatcttcacaagatttgtatttttagctcccacatatgagtgacaacatgcaatatttgtctttcagtgcttggcttatttcacttaacgtaatgacctccagtacaatccatgttgctgcaaatgacaggatttcattcttttttatggcaaattttacacacacacattcacgtaacagtttctttatgcattgatagacactttgattggttccatattttggctattatgaatagggtagcagtgaacataggagtgaacatactcattttgatatattcatttcctttcttttggatatatactgagtagtagaattgctggatcacagcacagttctctttttagtttctttgaggaacctcaatactgttctccatagtggctatactaatttacattttcatcaacagtgtacaagggttcccttttctccacatcctcaccagcactcgttactgaccatcttttggatcaaagctgtttcaactggggtgagatgatatcttattgtagttttgatttgcattcctctgatgactagtgatgttaccattttttcatatacttggccatttgtatgtcttcatttcagaaatatctgttcagaccttttgtctgtttttaaattggattttttgttttttgctgttcagttgtttgagctccttatatattctggttattaatttcttgtcagatgggtagtttctaaatattttctctcattcagcagattgtctcatcattttttttattgtttcctttgctgcgcagaagttttttttagcttgatgtaatcccatttgtcttttttgctttggttgcctgtgcttttggggtcttacacaaaaatttttggccagaccaatgtcctggagcatttccccagtgttttttttctagtagtttcaaagtttcaggtcttagatttaagtctttgatccatttttacttgatttttgtgtatggtgagagataggggtctagtttcattcttctgaatgtatttatccagctttcccagcaccactgaagagacagttctttcctcactgcatgtttgtggagactttgtcaaagatgagttgctcataaatgcgtggatttatatttgggttctccattctgttccactggtctatgtgcctgtgtctgtttttatgcgggtaccatgctgatttggttataataactttgtagtaaattttgaagtcaggtagtgtgatgcttccagctttgtttgttttgttcaggattgctttgactattcagagtctcttgtggttccatataaattttagaacatttttccttttctatgaagaatatcattggtactttgatagggattgcattgaatttgtaaactgctttaagtagtcttgtcattttaatgatattaaagctgtgaacatagattagaatatctttccattttttgatgtgtcctccaaaatttctttcattggtgttttatagttttccttgtagagagatcttttatttatttggttaaatttggttgctaggtttttaatattatttatagctattataaatagaattgctttcttgatatctttttcatattgttcactgctggtgaatataaatgctgctgatttctgtatgttgattttgtattttgcaactttactgaattagttcatcagttctaacagctgtttggtggaatctctgtttttctaagtataagatcatgttatctgtgaacaaggctaatttgacttcttcttttccagtttggataccctttatttttttctcttgcctaattgctctggtcaggatcttctagtattatattaaatacaagtggcaaaagtgggtatccctatcttgttctagatcttagaggaaagtccttaatttctccctgttcaggatgatgttagctatgggtttgtcatatatgacccctatattttgaggtatgttcttcttatatctggtttgatgagggttttgatcataaagcgatgctgaattttatcaaatgcttttttggcatccattgaaataatcatatagtctttgttcttggttctgttaatgtgatgtatcatgtttatttatttgcatatgttggatcatcctcgcatccctgggattaatctcacttgatcatggtgcatgatctttttattctttttttttttttttttttttactagacagagtcttgctcttgttgcccaggctgtagtgcagtggcacgatctcggctcactgcaacctccgcctcccgagttcaagcgattctcctgcctaagcctcccgaatagctgggattacaggcagatgccaccacgcccggctaatttttgtattttcagtagagacggagtttcatcatgttggctaggttggtctcaaactcccgacctcatgatctgcccgccttagcctcccaaagtgctgggattacaggcgtgagccaccgcacccggccgatcatggtgaatgatctttttaatgtgttgttgaagtcagttggctagtattttgatgagaatttttgcatctgtgttcatcatcttagttttccttttttcgtcatgtccttctctggttttggtatcagggtaatgctggcctcatagaattagcttgggagtattggagtattcattcctcttcaaaaaaaaaaatttttttttgagacagggtcttgccctgtcacccaggctggagtgcagcagtgcagtcacagctcggtgcagtcacagctcactgcagccttgatctgctaggctcaagggattctctgcctcagccacccaagtagctaggactacagatgtgtaccaccatgcctggctaattttttttttcttttcttttgggtagagacatggttttgccatgttgcccaggctggctcttcagtttttttgaagaatttgcgtaaaattgatatttgttatttaaatgtttggtaggatgcggcaataaagccattaggccatgtggggatttctttcatgggagactttattatggcttcagtatcactactcgttattggtttattgagttttcctatttcttcatggttcaatcttggtagatgtatatgtctaggaatttatccatttcttctaggttttccagttttgttggcatgtagttgttcatagtagtctctaatgattctttgtatttccgtggtctcaattgttatgtctcctttttcatttctaaagttatttatttgggtcttccctctttttcttttttctcggtctaaccaagggcttgtcaatttttgtatcttatctttttttattttgtgagacagcatcttaatctgttgcccaggctagagtgcagtgaaatgatcatgggtcactacaaccctgaactcgtgggctgaagcaatcctcctcctgcctcagcctcccaagtatctgggtactataggcatgcaccaccatgcctggctaattttttttttttttttaaagatggggtctcacaggtctcgctatgttgtccaggcttgccatgaactcctgcctcaggcaatcctgctgcctcgacctcccaaagtgctaaaattgtaggtgtgagccaccatgcccaacccttgtatttatatttaatttaccaatgggttttatacctttaaatgtttttcttttctttttttttttctttttgcactttagtgtttttttcttgcagattgaataactcaatatttagtgtttcttgtaagatggtggtgaattctccctgctttcatttgcctgggaaaaacatatttgaaggataactttgctgaatacaatatttttggatggcagttttttcagcactttaaaaatgtcattctgctgcttccccctggcctgtatggtgtccattgagaactgccagacacattggagtgcctttatatgttatttgctgattttctcttgctgcttttaggattctgtttgtccttgacctttgagagtctgattattatatgtcttgaggtagtcttatttgggtcaaatctgtttggtgttctctaaccttcctatacctggatatttatatctttctcaagttttggaaagttttttgtttctctttttttttgaataagctttctaccccttgcacttgctcaactccctattgaacctcaataattcttaaattttgtcttttttctttcctccctgtgtcacccaggctggaatgcagtggtgtaatcacaacttactgcagcctcaacctcctaggctcaagcaaatcctccctctcagcctcccgagtaactgggacaacaggcacgtgccacaatgccaggctaattttttgtattttttctagagacagggttttgccatgttgcgcagactggtcttaaactcctgggttcaagcaatccacccgccttggccttccaaagtacggggattacaggcatgagccactgcaccaagtcgagtctttttttttttttttttttaaagacaggttctcattctgtcccctgggctagagtgcagtggtgtgatcaaagctcactgcagtctcgaactcctgggttcaagcagtcctcccacctcagcctcctgcatggctggaactacaggcatgcaccacaatgccctgctagtgtttttattttttgtagagaggggggtctcactatgttgcccaggctagtctcgaactcctgccttcaagtgatcctcctgcttcagcctcccaaagtgctgggattacaggcatgagccaactcatttggcaaatttggtcttttgaggtaattttctgtatcttgtaggcaatctttgttgattctcattttttaaagatttttttctcctttatgtattttcaagtagcctatctttaggctcaatgattcttacctctgcttgatccattcttctttggaaagcctctaaggaattcttcagctctgcaaacatatttctccattctaagatttctgcttgatttctttttattatttcaacctctttgctaagtttatttgataaatttctgaactgcttttctgtggtatcttaaagatcactgagtttccttagaacttctattctgaattcttggttagagagcttacatatcatcctctcatttagagtgagttgctggttccttgctatgtccctttggggagatcatgattccctgtttgctgttgtttcctgttgatgtgtatgtctttgcattgaaggattattcatttaatctagtcttctctggctggcttgtttttgtattttattggatacatttgcttagaggctttttgctgctgggtcactgcctcctttttagctctaggtggagccttaaacccaggttcacctcagctcttagtaaactatcagaacgctgctcttcctgaatgggggaggtccccaggggattttcttggcagggtgggaaggctggctaggggtccatgcccaggggatctgtgggacaaacctcctatagtgtggtactgctaaacagccactctgatttggcatctccttttgctgagttacacaacagagattccagagctggggatggtagtcccacctccctgctttgcctctgtctgtcctcagggatatttctcccttcaggcacttgcgatgcttcccatggattaaggcagagcaggcctcctgccagggaacccaagatggtagagaagctgaatgtccacctcaattgcactttttccagtgtagaaaccttgagttggaggaaatgtttttgcatgcctggtgatcggcataatgtggggaatgttgttatggatgtagaaatccaattgtcttaccatctgctcagggttttttctggggtcctgggaactgtctcatcttcatatttgagttctgaggtccttctggtgataatttcagcactgtatatttgtttttatttttctgttggggaggggtgggtactaaagccagcttacttctatgccaccatttcagaactggaagtctttcacttttgaaagtttgattttagtgtgtctagatgtgggtgtctttgagttcatcttacttggagttcatttaacttcttggatgtttgtattcaagtctttcaccaaatttggagagttttcagccattatcttttcaaaatactcttgctacccttttctctctccttatccttctggaattcccacagtgtgtgtgtgtgtctgcctgatggtgtcccacaggtcctttaggctctattcacttctcttcagtcttttttctgatcctcagacttgataatttccattgtcctctcttcaagtttgctaattctttcttctgcctgccaaatctgcctttgaatccctctagtgaatttttcatttcaattattgtacttttcagttctggggtttgtggtatctttttaagttttctatctctttactggtatttccattttgttcatacgtcattatcttgatgtccttcacttcttcctttagttctttgagcatctttaagacagttgttttaaagtctttgccatcaggtctctttcagggaccgtttctgttgacttatttttcttcctttgactgggccatattttcatctttcttcatatgtcttgtgatttttttgttgttgaaaagtgaatgtttgaatctaacagtgtggtatctagaaatcagattctccccctcccctgggctcactgtttttgtttacttatttgatggttgtatactgtgtgtatgctgaggaaaatataagcctgaggtataaatgtaaggtctcctcaagtcttttctttttcttttttttttttttttttttgagcagagtcttgctctgtcacccaggctggagtgcaaacggtgctatctcagctcactgcagcctacacttcccgagttcaagcaactctcctgcctcagcctccagagtagctgggattacaggcacctgccaccacaccccgctgatttttgaatttttagtagagatggggtttcaccatgttgcctaggctggtctcaaactcctgatctcgtgatctgcccacctcagcctcccaaagtgctgggattacaggtgtgagccactgcgcccgacctcttttttttttttttttttttttttttttttttttaaagacagaatctcactgtgtcacccaggctggagtgcagtggtgcaatctcagctcactgcaacctccgcctcccaggttcaagcaattcttgtgcctcagccacccaagtagctgggattacaggcatgtgccaccacacctggctaattttttgtatttttagtagagacattgtttcaccatgttggctaggctggtatcaaactctgacctcgggtgattccccctgcctcggcctcccaaagtgctaggattacaggtgtgagctagcactcccagcttctcaggtcttttctgagcctttctctgggcatccatggtcatttctattttcccctatatatatgtgtttgtttttgaatgtcctagtctttaatgtctggcttctaaaagggaaaaaagcaaaaaattaatgggggaggtgctggccctttaaattacctggaggtcacttcagcccaagggagaggggcttgcaacattggagggacatacaataacagtggctctcagcctctttgtctgcacttctgtgattagaaccagcaatcagtgatcagagcacagatccttgatatttggagggtcagggtctttgtttctgcctaccctggctccctcaagctatgtgcaggttgctccaggaacatgggcacagctgcctaccatgtgactgagaggtgggggatgggtagctgctgctctgctaagagctgaagttgaccaaaattaactactatttaatatccaagccttccccgagaagttgcaagccttcaatagattccaagtggtttcaaaatagttacagcaggaagattttgctaatgcagttgtctgggtggggaagattgctggtgctttctactccaccatcttccccctctcttagattttcacatgtgtggttacattaaatcctgatgagcagagaatttgccccaaacatttcttggtatttttagggaaatgtatatgttgcaaattctagtctccagtgtgaatgataagtaaaatgtggttgttgctgttacatcattatgttttttccctgtttttagataaaccagatattttcaatcaatgaaaaacgatgacagatatttcaggcagtcttcaattagctggcaataatatgttttatattaaatgaaatgtttcgtaagccatgtacacttttaaaatccatctctatctcaccatacctcacatgatacagtgcttatgttgtggcaaaataagacccagactcaagttttagaattccttaaggtaaggtcggctacaagaaggaatgagggcccccacacaaacttgcaaggccccaaaagacagtgatttttcttgagatacattaagtcacaagcacactaatcatggtgaaatgttacaaccgtgcaaagtatttgatagtgttaactactgatgtccagggttttcatgaagatatagctgacatatatattttttaagatcatgctatttatctagggagagtaaaacatcagtttgccagggttttaacttttctttctttttcttttctttctttttttttttttttttgagatggagtctcgctcttgtcgcccaggcaggagtgcagtggcgcgatctcagctcactgctcactgcaacctccacctcccgggttcaagggattctcgctactcagccgcccaagtagctggaattacaggcgcccgcgactgtgcccggctgatatttgtatttttagtagagacagggtttcaccatattggccaggctggtctcgaactctttttttgtttgtttgttttttgagacggagtctcgctctgtcacccagggtagagtacagtggcgcaatcttggctcactgcaagctccgcctcccgggttcacgccattctcctgcctcagcctcccgagcagctgggactacaggcgcccgccaccacgcctggctagttttttgtatttttagtagagacggggtttcactgtgttagcgaggatattctggatctcctgacctcatgatccgcccgtctcggcctcccaaagtgctaggattacaggcgtgagccaccgcgcccggtctggtctcaaactctctacctcagatgatccaccctcctcggcctcccaaagtgttgggattacaggagtgagccactgcgcccggccgggttttaacttttcttaactggcagttattttttttgagacagagtcttgctctattgccaggctggagtgcagtggtgcgatctccgctcactgcaatctccacctcctgggttcaagcgattctcctgcctcagcctcccaagtggttgagattacaggtgtgtgccaccacacccagctaatttttgtgtttttagtagagatggtgtttcaccatgttggccaggatagtctccatctcctgacctcatgatccacccgccttggcctcccaaagtgccaggattacaggcgtaagccaccacgcggggccctttttttttttttttttttttttttttttttgaggcaaggtattgctctgttgctcaggctggagtgcagctttgcgatcacagctcattgcaacctcatcgaccttctgggcttaatcaatcctcccacctcagcctcctgagtagctgtgactacaggcatatgcactatgcctggctaatttttgctttttgagtttttttcctgatagagccgagattttgctatgttgcccaggctgatctcaaactctgggctcaagtgatctgcctgccttggcttcccaaagtattggaattagaggcgtgggccaccacacatggcctaaggcctaattggcagtcttcatgacatagaacttcatctcttatgggcagggttggcttcatggacatgtaatttgtgctcttagacatacctagtgctgatataatattcttctgttgccattgtgaagttcttaataaattataaacaaagacctctgcattttcattttcaccgggccccgcaaattgtatcgctcgtcctgattatgggagctgatttcatcttcctttaccatatcgtatgagctaaagcatggttttcacgggataaactatggaacaggcaagggtggtggtaagccaaaggagcttctggccaacactttttatttctaccagagactgaacttggtatgataggcaagggaaagaaagagcatagtttagaagcaggcaggggctactgacagctagagattctccattaataacaacagcagctgctggtactcctgctacacccacgaccatttcaagtagctaaaatatctgccaggctctggctaagtgcttcatgttcattatttcctttaacttaatcttctcaacaacctacaaattgagtattatttttatagatgaagaatccaaagttaccagtaattaagttgcctacaattatagaggcattcactgtccttcctactcacttaaaaagaaccagtctatcttgtcttgttaaaattggatgtgaatcaccaattttcaccctttaaaagatgtattggcagggcaagggccatagacttcgttagttttttttttctacttttttacttttaggtataattgtagatagtattgttgtttagtaccttttggatagatattttctttcctttttctccatagatgctatctagacagtataacaatactggaagtgttttccaagaagaaatacatacaccctcctctttgtctcagaagatgtcagtaaacagtcctatctattttttaaacctcagccaaaataacatttagttcattgattatctctgctattattgttttcttagtttttatgtgtgattgtattctaccataattttaaaagattatccagctaggcatggtggctcatgcctataatcccagcattttgggagcccaaggcagatggatcccttgagcctaggagttcaagaccagcctgggcaacatgacgaaatcccatctctacaaaaaatacaaaaaattagccaggcatggtggcacacacctgtagtcccaactactggggaggctgaggtgggaggatcacctgagcctggaggtggaggttgcagtgagccgagatcacaccactgcacttcaaactgggcgacagagcaagaccctgtctcaaaaaaataaaaataaaaaaagattatccatgtgttctattttaattttgcattaaaatatagtttttcacaagtttataaatacagaaatctcattctggactaaccccaatcacgtgtcttgcaggaaagcgtctctagcagctgatatccccagacttggatatagttcctcatcccatcacaagtacatcccccggagggcagtgctttatgtacctggaaatgatgaaaagaaaataaagaagattccatccctgaatgtagattgtgcagtgctcgactgtgaggatggagtggctgcaaacaaaaaggtaatggcatgattttagtatgagaaaaagaaaggtattgaaatttgcttctcttccgaatagtgacattgcccgctatttggaaagattctaccacactcatcttttgctgattattaacaattctttgatctgcttttatataggttctaaatgtgtatctcttttctctgagagaaaggaagaatcccaccaaaatatattttaaaatcacgaccttcagtagatgagactatgtgtatgtatagataaaaagatggacaatcaattttggccatgatgtttgccggtctaggtaaatgagtgacatcaggggtccccaatccccaggccatggaccagtacaggccacaatacaggcctgttaggaactgggccagaacccaggagatgagcagtgggtgaacaagcattatggcctaagctctgcctcctgtcagatcagcagtggcattagattctcaaggagcacgaccctgttgtgaactgcgcacgtgaaggatctaggttgcacgctccttgtaagaatctaactaatgcctgatgatctgaggtggaacagtttcatccgaaaccattgcgccgccccacctcccatggaataattaccctccacaaaacaggtccctggtgccaaaaaggttggggaccactgaattagataattctaaaattgtggtgtaagattttcagactgataaaatgcaactaggaagttctttcttcttcttaccaccaggtatactgagtaatggtcttttctcttctgggatacgtgtcaagagaataaaacatagtttttcatggataaatcaccattttctctacttaatttaagggaaatgacacatagaaccttagtggttggctgtagcttctggcttatttcctcatggcctgaccaaagagatgagccttagaaaatatccaacttgtaggccggatgaggtggctcatgcctataatcccagcactttaggaggccaagataggagcatcacttgagctcaggagtttgagaccagtctggccaacatagcaaaaccccatttctaccaaaaaaaaaaaaaaatttagccaggtgtggcggcgtgtacctgtagtcccagctactcaggaggctgaggtggtagaatcacgtgagcccgagagtttgaggctgcagtgaaccatgatcgtgccactgcactccagcttgggcaacagagtgagaccctgtctccaaaaaagttttaaaaaaacaaaataaccaatttgtaaataggtacaaaagactcttactgcgtgactgtatagtagttgctttttattttgttttgctcaactttgttttctatgtttttctaatgaacatggattcattcaatgattagttgagatatataaatcattataacaataacttacatttgcatggaacttttaaagttaaaaacatgagttcgcttgacctttatctatccaggccctagacaatgaggttgggctgggaatgggtcgtggggcgggggatgagggagctggctctctggatttatgcctacttgaaagtttcttgcgccaggtgacctgaaacaacgtggctgtactatacaattttctggattaattgctttttctggagtttctagcaaatatttgccttaattttaaagaaaaaatttaatttccagtatcttcctaatggtcaaactaaggctttccaagtatttggaaaaggattagaatgagcctgtggaatctaaaatgtctactcaacatctttggcatgtgccaaggaaaatactattaatccttctcccagagattaaagtaaataggcctttttctgaaggctgtaatatgatttcagtatgctccttcccataactcatgtagtgcactccaagattcgatgctaacttgtaattccagttctgtgtgacccagggcaattcactttacttctttgcctcaatttcttatctgtactgtagggatgacaatatcttcttttgtcagggacagggtttattatgagaaaaaagttgataaagtacctgggagtagcttgatttcctataggaaatagataaatcctgtagtaatcatgattagaggggaatttattgtagcattgtagcacagtgagccattaggtgccctgataaacttctaattatagttcttcacaaatcttgaggttgtcctccaatacccacctgagaatgttttctgccactcaaatgagttggaaatatagtctatttctgctttacatttccttattgtttatctgggttccgaagccatccttatctccatagtagtagcagctgtgctaccacttaggggaaacctgaggaggagaagggaaagaagagttaatgattgcccaccatcttgaagtacatatgtccacatcgagtctttactaggacattttcattctcctaatgcagctggacattgcaatgtgctagacatactgttttaggcatcctaagctcagagtcagctaaaatttcattaaaaaaattttttttggtcgttgtgttgcccaggctggggtgcagtggtgtcatcatagctcactgcagcctccaactcctgggctcaagcagtcctcccacctcagcttcctaagcagctgggactatacgcacctaccaccatacccagctaattgttttattttttgtagagatagggtcttgctgtgttgcccaggctgttcttgaactcttggactcacgtgatcctcctgcctcagcctcccaaagggctgggattacaggcataagccatgatgcccggccaaaattctctttttcatccatagaaacttctggaaagccaagctggtctttgtttaaaataataataacaataggccgggcacggtggctcacacctgtaatcccagcactttgggaggctgaggtgggcagatcacaaggtcaggagatcaagaccatcctggctaacatggtgaaaccccatctctactaaaaaatacaaaaaattagctgggcgtggtggcgggcgcctgcagtcccagctactcgggaggctgaggcaggagaatggtgtgaacccaggaggcagagcttgcagtgagccgagatcgtgccactgcactccagcctgggtgacagagcaagactccatctcaaaaaaaaaaaaccaaaaaacaaataataataataataataataatcttggccgggtgcagtggctcacatcagtattcccagcactctgggaggccgaggcaggcggatcacttgaggccagtagttcaagaccagcctgggcaacatggcaaaacctcatctctactaaaaatacaaaaaatcagccaggagtggtggcacacacctgtaatcccagctactcgggaatctgaggcacgagaatcacttgaacctgggaggcagaggttgtagtgagccgagattgccccactgcacttcagcctgggtgacagagcaggactctgtctcaaaaaaaaaaagttgtttttttttttttcttaaaatctctatctaggacttaattttatctgacatatttcacatcatagccctagcctgtcaaggtctttttggattttgatttcattatccaacatttatattatctgagaatttgacatgcacatcatatgaaaatttaacaagtttcagggaaattttgaagaggttggggccaagtgctgcacaagcatgccgctaaaaacttcttttccggtttattgaacagagacgtatatagtgctgacgatatgctgggcgctgtaatttgcatgacaagccattgaggtgctatgattacattcattttacaagtaaggaaattgaagcacagagatatccagttcatgcacgtttttttttttcatagatagagttttgctattgttgcccaggctggagtgcagtggtgcgatctcggctcactcactgcaatctccgcctcctgggttcaagtgattctgctgcctcagcctcccaagtagctgggattacaggtgtgtaccaccgtggctggctaattttgtgtttttaggagagatggggttttaccatgttggccagactagtctccaactcctgacctcaggtgatctgcccacctccgcctcccaaagtgctgggattacaggccaccgcacccagcccccacgcccaacccagttcgtgaattataccatgaatgtgcttattcagaaacctaactctcctaaaatccaatcttttcacgcagatattatgatattttcatcaaatgccttttcaaaatgaagatatgttcccaatctacttgtccaaaaataccttctccctcaatacctccacctaaccagcaaagtgaggtcaggtaaatgagacttgttcttgaggaaacccaagtcagtacctcattgctaccacctctttgtaaactgttggaaatacaaaaatgctgtactgagaattttctttcttccttttcttttcttttctttttttttttttgagacagagttttgctcttgttgcccaggctagagtgcaatggtgtgatctcagcttaatgcaacctccgcctctcgggttcaagagattctcctttctcagcctcccgagtagctgggattacaggcgcatgccaccacgcctggctaatttttgtaattttagtagagacggggtttcatcatattggtcaggctggtctcgaactcctgacctcaggtgatctgcccacctcagcctcccaaagtgctgggattacaggcgtgagcctgagaattttctgttacaagtgctgtattacatatattgttatttacataccttatcccatttacatatgttatcttaatccttatagcaatgttttgaaatatgtacaaggtcacattgccattaaatagcagaaccaagatttgagtctcctagaatttttgccaggaaccagcctccagctcacctgctcgtgtatgtcctaacccacgtttttcgtctttcttggaaagtgagtgccttggcttctttttatctttagtcagcttcctgttctccattatctctccaaggtaactgacaggagctctgtgttcccatctgcagactctttcagtgttctgggactgggattatcatccatttagacctaggagcttcaattcactggaaagtccagataagcctgaaacttctcaaatatctcatattctcttttctttctcaaagtcacctcttaatcatgtttcttatttgaatattattctcttgatggaggacatagagaccatttttagtgagtttatttctcagtaagaagaaatccatattaaaactcttaatttcagattatctagttagagtctggctaaactgaatcattattgcctaattcagctttcttggcattattaaaatgtcacttcattttatatctcatttttttattaatagactaattccatatttcatttgattgactctctgtgaagtatgggcttataatgaaaacaataggagtttccacaaagcagtttataagtatataataccttccagcaggctctaatcctgtcctgctaatccaatttgtgtttaagtagctccttcatgtcaaggatggcactaccagctcaccttcccaagcacggatgataaaaaagactgcctccactccctcttatctcctccttttcattgttaaatgcatgaggaggtgtggggctgtctaagccactgcttgctgggccacagtaaaaatatgccaagtaatgcaccgatttctgatgtaactccatgacactgggtgaggccaagaaagtaggcactgaggaggaagaggcatgattccatagctgccatttcagttgaatggatatttaaacaattctttaaatttatttactatttaagtatttaagtatttaaatgtaaatactaatcaatacttaaataaatactgagtacctactcaactagttgccatggcaggcaggagggagacaaaaatggtggcagatccccaacctggaggagacacaagctgttgttgagagtggcaaaaagtaaatagctatgatccaacaaaataggtctatgagaacatatttcttttttaatcatttggttctgagtggggttttttgtttttgtttttttgagaaggagtctcgctgttgtcgcccgggctggagtgcaatggtatgatctcggctcactgcaacctctgcctcctgtgttccagcaattctcctgcctcagcctcccaagtagctgggattacaggcgcctgccaccacgcccagttaatttttgtatttttagtagaaatggggtttcaccacgttggccaggctggtctcaaactcctgacctcaggtgatcctgcctcggcctcccaaagtgcagggattacaggcgcgagccaccgtgcctggccagttctgagtattttttaattgtcatttatttggtctcttgcttgaaatataacatacaaaagagtgcttcccaaagtctatgatgaagaaccagtttagttatccaatccattgtggactgatacttttgtaaaatacaatacaaatgaattgctataaaaattaaatgctggttgggtgacagcaatgtcaggtgctacagaagtttctaaactgttactctccaaggttgcacttaatcatagtggcatggtaaagtttcagggactgagactgggccacaaaccatagcttgagtagcaaggacttaaatttccaagtgtaggagagttttttgttttttgtttttttcaatttatctttttgttgctgagctctagcgtagtgacatggtgggtggttagagaaatgtgatgtgaatggtgatgattctttgaaatttgtcattctgcttcatgaccaactacattagccattttttgtaactgttccatgtgctgaagaagaaagtatattttctacttactagatgcagagttctatatattttctattagaccaagcctgttaattatgttattcaaatatacaaatctttaccgacttctatctgcttgatgtgtcaaaaattgagagagtctagttgaaatctattctccaatagaaaatttgccaatgtctttaggtatatacacatttagaattactacatattcctggcatattgattcatctatttctatgtactgaccatctttatcccttataatgcattttgcttgaatgtttatgtggtctgatcgtaatacagcaacatcaactttccttaggttggcatttgctcagtgtaacattttcatccttttgctttcaaagtgtccatatctttgtattttaattacgtctcctatttttaaaaaatttctatatccatgttgacaatttcactcttttttttgagatggagtctcgctctgtcacccaggctggagtgcagtggcatgatctcggctcactgcaagctctgcctcctgggttcacgccattctgctgcctcggcctcccgagtagctgagactacaggcgcctgccaccacacctggctaattttttgtgtgtttatagcagagatggggtttcaccatgttgatggtccggatctcctgacctcatgatctgcccgtctcggcctcccaaagtgctgggattacaggcatgagccaccatgcccagccgacaatttctcttttaactagaatgttaatccattgtcttttttttttttttttttgaaacgtagtctcactatgttgcacaggctgtagtgcaatggcacgatcttggctcactgcaacctctgcctcccaggtttaagcgattctcctgcctcagcctcccaagtagctgggaatacaggtgcctgccaccacacctggctcatttttgtattattagtagagatggggtttcaccatgttggccagtctggtctcgaactcctgacctcaggcaatccacccgcctcggcctcccaaagtgctgggattacaggcatgagccactgcacccggctaatccattgacttttaatgtaattactgacgagtttcactttaattacaccattatatttcataatgttttcccacctgtttcatgtttcttttttcatctttctttccttttaaaatatatatatatttttaaattttttattatttatttttatttatttatttatttattttgagacggagtctcgctgtgtcacgcaggctggagtgcagtggtgcgatcttggctcactgctagctccgcctcctgtgttcacgccattctcctgcctcagcctcccaagtagctgggactacaggcgcccaccaccatgcccagctaattttttctatttttagtagagatggggtttcactgtgttagccaggatggtctcaatctcctgacctcgtgatctgcccgccttggcctcccaaagtgctgggattacaggcataagccactgcacccagccaaattttttattttttgagactgagttttgctcttgttgcttgttgcccaggctggagtgcagtggcatgatctgggctcactgtaacctctgccccccgggttcaagcagttctcttgcctcagcctcctgggtagctgggattacaagtgcctgccaccacgtctggctaattttttgtctttttagtagagatgggggtttcatcatgttggccaggctgatcttgaactcctgacctcaggtgatccacccgcctcggcctcccaaagttcgaggattacaggtgtgatctaccatggctggccagtttgtttattttcttagttcattctttcctctcttagtttataagttaggactgtgtttgtaatttttattggttactcttgaaattttactaagcacgcttaacaatgcctaaaattaatccatatctttcttctggacagctcaagaaccttggaaaactttaaatccagttatttctctcgcactgtatgcgttatttttgctcaatattttagttatctctctttaatcctatacattttatattattgctatctacagtatttctttatattatcttacatattttcccactttttttttgcttatcatttgttttgtatctcagatcttcctggggtcagttttctttctcttcaggtgcaactttcagaatttccctatagcgaaagttggttgatcataaagtttacatttttgttttttttgaaaatgtctttatggcctgggtgtggtggctcacacctgtaatgccattactttggtaggccaaagcaggcagatcacctgaggtcaggagtttgagatcagcctggccaacatggtgaaaccttatctctactgaaaatataaacattagctgggcgtggtggtgcgcacctgtagtcccaccctcaggaggctaagacaggagaattgcttgaacctcagaggtggaggttgctgcgagccaagatcataccattgcactccagcctgtgtgacagaacgaggctctgtcttggggggaaaaaagtttataataaaaaaaatttcaaaggatgggtaccttgttttggaacagttgactatgttctctagagtgccatcctactgtaaaaatggatacatttcaacaaaagtccttttttttcccttggtatactgaagttttactaaaatgtgacaaagtgtggatttattactctttttctccctcccttcctcccttacatttttgcttcctttttgcttggtataagttgtgtttcctatatttgtagattcatgtcttttatccattttgtaaaatttccattagcaattcacatatggcctctgtttctcctttctattctttccttcagagatgctgagtacacgtagttggaaacttcattctatcctccttctctcttaatatcttctcatattttcttcttgtttctctgtgttacattctcagttagttcttcatgtttaatttccagttttctaattctgtcttcaattgtgtctaatccgtttaacccatcctctgaggttttttgttttttggtttttgttttgctttttttttgagacgaagtcttgctctgtggctcaggctggagtgcagtggcatgatctcggctcactgtaacctccgcctcctgggttcaagcaattctcctgcctaggcctcccaagtagctgggattataagcatgcaccaccacgcccagctgatttttgtatttttagtagagatggggtttcaccatgttggccaggctggtctcaaactcctgagctcaggtgatccacttgcctcggcctcccaaagtactggaatttccggtgtgagccgccatgcctgggccatcctctgagttttttattttaattattatatttgttatatctggaagttctatttggttcttctacatatctgcttggtatattatgaatctgataaattcagtactttggggtgtaattttttttttttgagacggagtgttgctctgtcacccaggccggagtgcagtggtgcgatctcagctcactgcaagcaccgcctcctgggttcatgccattctcctgcctcagcctccagagtaggtgggactacaggcgcctgccaccactcctggctaattttttgtatttttagtttcaccttgttaacgaggatggtcttgatctcctgaccttatgatccgcccgcctcggcctcccaaagtgctgggattacaggcatgagccaccgtgcctggccataaataatttttaatctaaagaagagaaactttgattaaactttgggacacttatttactttccctcatcaacaatcatggattattatgtcatgattatgagtggcaaagtcttatatgcctcaagaaaacataacattattgagtgctatggcattctatagagaacttcaatctttggtcatagcattaagagttcttggtttcatagcctcatgagccctctttgaaataacctatctaaatcattttttgttgtttctgctgactcttacttatggcatgaacccatatgtatattttattcacatcagatctgtaatgtgccaacgttgcagcaagatttgaaggaggtacatctcacacaatagcatgagaagtcaatcatcatgcttgtgaaccacaaaaggatcatgaacccatattcattggaattaattcaatcaattcttagatcccaagagcttagagtgagaaggttttcctccaaagaaaatttgtgtttgctcctactgaaagtcaaagatattactaatgtgggagtctcaatttactctctctaaccttgcagtggtctcaaggcttagtattctgatactaggtctgatataggtatttgattccccgtgtccttatttttctttcacaaatcagaattcaacctattgctttttgttattcctctgcttctggaaaattctctctttttttttttttttttttttttgagatggactctcactttgttgctcagtctggagtgcagtggctcaatcttggctcactgccacctctacctcctgggttcaagcaattctcgtgcctcagcctcccgagtagctaggattacaggtgcccaccaccaggcccagctaatttttgtatttttagtagagacaggtttcaccatgttggccaggctggtcttaaattcctgacctcaggtgatccgcccgccttggcctcccgaagtgctgggattataggcgtaggccaccgtgcccagctgaaaattcttttacattttactgagcccaaaaatgcattaaaaagtacttttgttgaaatgtatctatttttacagtaggatagcacttcagagaacatggtcaaccattccaaaacaaggtacccatcctttgacatttttttttgattttccgagacaagagtcttactctgtcgcccaggcttggggtgcaatggtgcgatctctgctcactgcgacctccgcctctctggttcaagtgattctcctgtcctcagcctcctgagtagctgggactgcagatgtgcaccaccacacctggctaatttttgtctatttagtagagatgaggtttcaccatgttggccaggctcatctcaaactcctgacctcaagtgatccacccacgttggcctcccaaagagctgggattacagacttgagccaccccgcctggcttttttttttttttttttttttttttttttttttaaagacagggtcttgctatgtcacccaggctggaatgcagttgttcaatcattgctcactgcagcctcaacctcccaggcttaaataatcctcccacttcagcctcttgagtagctgggaccacaggtgtgtgccactgtgcctggctaatttttttatttttattttgtagagatgggggtctctctatgttgcccaggcttggttataaactttaaaacaattagtctaaaattcattcttacacattatttaaaaagccaaatagttataaagcaacccccaaccattattgtttccccctttccagagacaatcccttttacctgttctggcttattcatatgccattttcttcaatatttctaaataatacattttttttttttgagatggagtctcgctctgtcacccaggctggagtgcagtggcacaatctctgctcactgcaacatctgcctcccaggttcaagcagttctttgcctcagcctctccggtagctgggattataggcgcccagcaccacacctggctaatttttttgtatttttagtagagacagggtttcaccatcttggccaggctggtcttgaactcctgacctcgtgatctacccacctcggcctcccaaagtgctgggattacaggcgtgagccactgcgcttggcaataatacatttcttaaatttttttttttctatttcaggcatgatatattgactcctcactatggagaatgaggatttatcattcctccctctccaccttgtctctgccacgtgtgaaccttgcccatcccccagttgtcccaatacaattatattttaactttagtaaggttaatattcagtgtaaaaactatttagagctgaactatatagtaataaatgattatctttctatttctgccagacctattgttttccatggaggtggagttcataattgcctttttttttctggcttagctttccttttttttttttttttttaattatactttaagttctaggatacatgtgcacaatatgcaggtttgttacatatgtatacctgtgccatgttggtgtgctgcacccattaacttgtcatttacattaggtatatttcctaatgctttcccttccccctcccccaaccccacaacagaccctggtgtgtgatgatccccttcctgtgtccaagtgttctcattgttcagttcccacctatgagtgagaacatgcggtgtttggttttttgttcttgtgatagtttgctaagaaagatggtttccagcttcatccatgtccctacaaaggacatgaactcatccttttttatggctgcatagtattccatggtgtatatgtgccacattttcttaatccagtctgtcattgatggacatttgggttggttccaagtctttgctattgtgcatagtgccacaataaacatacgtgtacatgtgtctttgtagcagcatgatttataatcctttaggtatatacccagtaatgggatggctgggtcaaatggtatttctagttctagatgcttgaggaatcgccacactgtcttccacaatggttgaactagtttacactcccaccaacagtgtaaaagtgttcctatttctccacatcctctccagcacctgttgtttcctgactttttaatgatcgccattctaactggtgtgagatggtatctcattgtggttttgatttgcatttctctgatggccagtgatgatgagcattttttcatgtgtgtgttggctgcataaatgtcttcttttgagaattgtctgttcacatccttcacccacttgttgatggggttgtttttttcttgtaaatttgtttgagttcttggtggattctggatattagccctttgtcagatgagtagattgcaaaaattttctcccattctgtaggttgcctgttcactctgatggtagtttcttttgctgtgcagaagctctttaattagatcccatttgtcaattttggcttttgttgccattgtttttggtgttttagacatgaagtccttgcccatgcctatgtcctgaatggtatcgcctaggttttcttctagggttttttatggttttaggtctaacatttaagtctttaatccatcttgaattaatttttgtgtaaggtataaggaagggatccagtttcagctttctacatatggctagccagttttcccagaactacttattaaatagggaatcctttccccatttcttgtttttgtcaggtttgtcaaagaacagatggttgtagatgtgtggtattatttctgagggctctgttctgttccattggtctgtatctctgttttgctaccagtaccatgctgttttggttactgtagccttgtagtatagtttgaagtcaggtagcgtgatacctccagctttgttcttttggcttaggattgacttggcgatgcggattcttttttggttccatatgaactttaaagtagttttttccaattctgtgaagaaagtcattggtagcttgatggggatggcattgaatctataaattaccttgggcagtatggccattttcacgataagattcttcctatccatgagcatggaatgttcttccatttgtttgtatcctcttttatttcactgagcagtgctttgtagttctccttaaagaggtccttcacttcccttgtaagttggattcctaggtattttactctctttgtagcaattgtgaatgagagttcactcatgatttggctctctgtttgtctgttattggtgtataagaatgcttgtgatttttgcacattgattttgtatcctgagactttgctgaagttgcttatcagcttaaggagattttgggctgagacgatggagttttctaaatatacaatcatgtcatctgcaaacagggacaatttgacttcctcatttcctaattgagtaccctttatttctttctcctgcctgattgccctggccagaacttccaacactatgttgaataggagtggtgagagagggcatccctgtcttgtgccagttttcaaagggaatgcttccagtttttgcccattcagtatgatactggctgtggatttgtcataaatagctcttattattttgagatacatcccatcaatacctaatttattgagagtttttagcatgaagggctgttgaattttgtcaaaggccttttctgcatctattgagataatcatgtggtttttgtctttggttctgtttatatgctggattacctttattgatttgcatatgttgaaccagccttgcatcccagggatgaagcccacttgatcatggtggataagttttctgatgtgctgctggattcagtttgccagtattttattaaggatttttgcactgatgttcatcagggattttggtctaaagttctatttttgtgtgtgtgtctctgccaggctttggtatcaggatgatgctggcctcataaaatgagttagggaggattctctctttttctattgattggaatagcttcagaaggaatggtaccagctcctccttgtacctctggtagagtttggctgtgaatccgtctggtcctggactttttttggtttgtaagctattaattattgcctcaatttcagagcctgttattggtctattgagggattcaacttcttcctggtttagtcttgggagggtgtatgtgtccaggaatttatccgtttcttctagattttctagtttatttatgtaaagatgtttatagtattctctgatggtagtttgtatttctgtgggatcggtggtgatatcccctttatcattttttattgcgtctatttgattcttctctcttttcttattagtcttgctagcggtctatcaattttgttaatcttttcaaaaaaccagctcgtggattcattgattttttgaagggttttttgtgtctctgtcttcttcagttctgctttgatcttagctatttcttgccttctgctagcttttgagtttgtttgctcttgcttctctagttcttttaattgtgatgttagggtgtcaattttagatctttcctgctttctcttgtgggcatttagtgctataaatttccctctacacactactttaaatgtgtcccagagattctggtatgttgtatctttgttctcattggtttcaaagaacatctttatttctgccttcatttcgttatgtacccagtagtcatttaggagcaggttgttcagtttccatgtagttgagtggttttgagtgagtttcttaatcctgagttctagtttgattgcactgtagtgtgagagacagtttgttataatttctgttctttgacatttgctgaggagtgctttacttccaactatgtggtcaattttggaataagtgtgatgtggtgctgagaagaatgtatagtctgttgatttggggtggagagttctgtagatgtctattaggtccgcttgttgcagagctgagttcaattcctggatatccttgttaactttctgtctcgttgatctgtctaatgttgactgtggggtgttaaagtctcctattattattgtatgggagtctaagtctctttgtagatctctaaggacttgctttatgaatctgggtgctcctgtattgggtgcatatatatttaagatagttagtcttcttattaaattgatccctttaccattatgtaatggccttctttgtctcttttgatctttgttggtttaaagtctgttttatcaaagactaggattgcaacccctgcctttttttgttttccatttgcttggtagatcttcctccatccctttattttgagcttatgtgtgtctctgcatgtgagatgggtctcctgaatacagcacactgatgggtcttgactctttatccaatttgccagtctgtgtcttttaattggagcatttagcccatttacatttaaggttaatattgttatgtgtgaatttgatcctgtcattatgatgttagctggttattttgcctgttagttgatgcagtttcttcctagcctcaatggtctttacaatttgtcatgtttttgcagtggctggtaccggttgttcctttccatgtttagtgcttccttcaggagctcttttagggcaggcctggtggtgacagaatctctcagcatttgcctgtctgtaaaggattttatttctccttcacttagtttggaagtgaagtttggctggatgtgaaattctgggttgaaaattcttttctttaagaatgttgaatattggcccccactctattctggcttgtagagttactgctgagagatccactgttagtctgatgggtttccctttatgggtgactctggcttagttttctgtcaatacccacttcatgactaattgtctgaatctccccttcgcatgttcagaagcatccagtattctatcggttcatttcttggagaagtctctccctgaaccatccagtcccttgaagtctgggctgctggtccttcaggcagtggcacaactggaatcctgaactctcccttccccaccattctggggattcccttcacttttcccttgtgatcagtgtcctgttttctacatcctatgacttttcatttctaggtatgtttctgtgttggggtgaggcatatccgccaatggctcctgagaaacggcttccttctgaagcatagaagcaacttatatgaacataatctcattttttttctaatttggcttgtaaagagtagagatctatttggagtctaaaccaaagaattgtgatttgaggaaggcctttttttgggaatctaagttaatattctaggatgtcacttgtgggcaacttaatttgataccagcagtctgagttagtggaaagggtagagggcttggcaacagaaaactcatttaaatttcccagttttgacacttgctagccagggaatttgagtcctgtaatctcatgagcctctgtttctttaatctatcccatgaggttggtgataatgaaacacacaccacccaccacagggccagctgtgaggctcaaacagaaaagccctttgtaaactctgaaatgctacataaatagtgtcttttttaaaaaaaaaacaaacaaaaaacagcggtgtcatttttaaagagggtaaagcttagaaaatttaagagagtgagtaattagtatgtcccttaaggtatctctttaacatacaggagcataatttgatagtcaggaactttagagccgtattgcttgtgcctgtgtctggattctgataacattttgtcctaacaatgtgaccttggggaaattaattccacatctttgtacctccatttcctcttctgtaaaataagagtaaggatggtaagagtagtattccaccccacagaattagattaaaggggcctgacatttgtgaagtgctgagagctgtgcccagcacatataagtgctatgtgagcatttgataaatccataaatagccattgtcttaaccgtgctcccaaacaagtgtctgagagcatcagttcaagtctctggtgattgattgctttagaatgccaagacttactggtattgattattaccttagagtcctgactctcacagggtaatatattgggacagataggttttctctctaaatatcatggagtttgccaattttgctattttttaagcttcccccctcaatggtagacaaagaaaagactctaatgccagaaaaacgccacttttccacttaagctcctatatagatttcttaacatgagggggctggaaacagccatctgagaaagatgttacttattttttttccctccagaagccagagagaaaaataagtcattttattgaactgctaaacaatagatttttactttgcattattgtgccagatacttgagcagttctcggaagaaagggaaaaagaaaaagtccagagaaggcagcaccatctggctgaggacagttcagagcaagtgggagctgggctggaggctggacactgagcaagacccacacacagtgacccttccccaccgtgggaaacaggaatgggagggcagctgcaggtgggctgggattgtctggggagagctggccaccctcagtagagggggcaggggaagcacctggttgagtggggatcagagcagccgctctcttctcagccagctgctccacgtggcagagtactcaggacaaccaggagggccgccttgttgcagctgccttcctcggtgaaacacagaggaaggcaaatgccttctaagtggcagtcagtgctttggcaatccctccaccccacaccccaccctacgccccacccctggagtttctcaactgggccatgctctttgaatgcttctcctgccaaggcctaaaagaaggtgagtggttgtggaggcgagaacaactggaggctgtgctgtagagaagggagtgcagctatgacccccacagtgagccccttcctaagtgcctcttccccaaacagaaattcctgcaaggcctcctgtagtcacctgttagactgcagaaccggggaggcactccatttgtcagtgtgagttgctcagaaagaaacgcccaatatcattcaaagttattggcttattattagtctttattattaatttattagtactctttattattattactttaattgccatacagatggagggtcctttccacctgagcatatatattctctctactttgtgctctcatttatacttcttcttgtgcacatgtgcatacataacacacacacacacacacacacacacacacacacaaagtacgtagaccttaaagccccatttatgcttacatagacacaccgtacacatacacgaatccatttggctaacttttaaattcctcagtgctgtcacttttgttgaaataaattagtggagtggctaggtgtatacttcccacagcgagccagtgaactaatgtgcagggaatgattaaatgtatacaggggcatggggagccaactcctcttcaataggggtgtgaaattaggatgggaaggctcctctcccaggtgccttgcttttattaaaagacttaagagctcaggagatgtcttcaataggaattaggatatctgagtctttctggaacagtgtggaaagctgaactgtgcttaggaactctgcaaggtctttttgatccttaaaggttctgatataaaaacctatccaggtttttataaaagtagtaaagtgttttcagtcttttattaatctcttcatacccttaaataacctttccccttttgaacagtaattgttaaaaaataaataaaaaacaacaaaaaattttttctcattgttttattcttcaaaccaggcatcctcttaatgcaaggattcaaatatctctattagggtcataatagtcagcaatttccatttaatgagatcagcaaagtctcttttcaaagagatgcaggctttaaattgccagttatttcttttcctgcaattcctaggaatccaattaagtaagactgagtatgatctataatgtgatatatctggctacagaaagcccgggcctaggcaataaaacagatctttgagctccagctcaaaattaagattaaaaaaaaaaaaaagaaagaaaatgcagcttaaatgattcaaagctttataaatgtggaaactgcatccatttcctctaatatgaagtaagaaatagcttcgagactatggtgaaaatcattaaagttacttattccaaatatagctactaattaaaatctctccgttggaccaggaccacaggtgatttttacaaaataaatttaagaggttttggtttgctaaatctgtgactaacgaatcaaatatgtggccaggcgccgtggctcatgcctgtaatcccagcactttgggaggccgaggcaggcagatcacctgaggtcaggagttcgagatcagcctggccaacatgatgaaaccctctctgcactaaaaatacaaaaattaggtgggcatggtggcacacacctgtaatcccagcttctgggaggctgaggcaggaggatcacttgaacccaggaggtggaggttgcagtgagccaagattgcaccactgcactccagcgtggctgacaagagcaagactccatctcaagaaaaaagattcaagtgtatataaccactgccaaaataaagagaagatagtgtgaaatcatgcagagaacatgcttcatatcaaaacatagtattcttttcagtttttaaaaatttcatttgccacaatttataacagtattaaatactatattttcatttattattattattattattattattttgagatggagtcatatgctgtcacccaggctagagtgcagtggtgctgtcttggctcaccacaacctccaccgtctgagttcaaccaattctcatgcctcagcctcccgagtagttgggattacaggcatgtgccaccacacctggctaatttttgtatttttggtagaggcaggatttcaccatgttggccaggctgatctagaactcctgacctcaggtgatccatctgtcttggcctcccaaagtgctgggattataggtgtaagccaccacacccaggctaaatactatgtttttaataataaatcagtgggtgtattttaagtcataatttagtattctgatttagagacagagttcagcaataatatcatacttttgccatgtatttttaaatatatcaaagcttctcaggatggtggtagtggtggtttaaatcttattctgtaccggctatgcaggccgcatggtgttttgctgataacagaggaggaaagtgtggctcgtgaggagcaaatgtcaagtcaggaattaactcaagacacagcctgcccttctactaaaaatgtgctatttcaaatatgtttttgcaatttcctccatgtaatgcagttgtgttagccatttattggtcagaaattaacctccaaaagttaacagttgggccctgaattctcagccaagtctagtctaagaagcagcatattcttgggcaagttattgattaactccaggtaattaaaccaaaaagacttttctagggccagggatagtggctcacacctgtaatcctagcactttgggaggctgaggagggaggatcacttgaggccaggagttcaagatcagcctgggcaacatagtgagatcccacctctacaaaagaaaaaaaaattacccaggcatggtggcatgtgcttgtggtcccagttactcaggagtctgagatgggaagattgcttgagcccaggatgttgagactgcagtgggccatgatcatgccaccaaactccagcctgggtgacagagtgagaacctgtctcaaaaacacaaaaaacaaaaactctccctaaacatctgtcaaaagagctcaaaagcctagagagaaagatgagccaggtgctggccggagataaaaggccagctttgtctttggtttcccaaagactattcaagaattggagggtgaattcttggagcctccaggggtagaagaatgaaactaaggttgaacaccaataggcattctgctgagcatttcatctaagccccctgccattttgcaggggaaggctgataacctggcccaactggtgcaggtctgcagggcatggggcagggtggaatgttgtcaagagtttctctttcctagagctgtggatggataggtacacaggggaaagcaaagtagagagggccagtaagtggaaaaaaactgttccacatagtcagagcaaagggagcctgaagtaggtatgagagcccaaatttgtggtcaagacataagaggattaggaagaacagacctaggaacttctactggtcagggccatcatggctccctgtgctggcagccatgattgggctgcttcactggagacatgctgcatgccatcagccttcaactttgagggccacaggtggggtgggcactaacacatctccttcctgggtttggctggaggacagtggcctccttgaattttggcccattcctaaactgaaggcagttccccaccatagttccttccagcctctccccttcctaagagggccaggctgtggagctgaccatggtgctgaagatgatctgagattgattccagagaacatttagggagtacttcctgtgtgctagcactatttctaagtgctctgcatgggttaactcatttcatgttcatagcaattctatgaaagaggtgctattattctccccattgacagatgacagataaggaaagtggaatacagagaggttaacaaacttgcccaaggtcacacagctaataagcaaggaagccaggcagagctgcactttgatcaccacatttgctaatgaaggttattaacagagccacacaaaacctcctggattttcacttgtccaatatcatcctagcagaagtgagccaaggttccccatctcaagttgccaggcaggttgctgtggggtggcatcttggagagtcagacacagtagtgtagactggttgggtacaagcaaaagtgggcagcccacctactccatctagtcagtcaccacaccctaatgttatgacttacttcatacctgcttccctggtaggctcttggctttgtgaagagggtgccatcgtatcccccattgcttaccagggtgcccaagacatagtcatagtaggtattcagcaaatattttatgaataaatgggttacatgtgatcaatatatggtagctgttattaatttgctattatttcaacattgatagaagcaccatgttgtagaaattatagtccctttttattttatatttgtcatgccccactttgggagttatatagagttcagagtgcatcttagtctcatatagatgcatgtgtggagacagaaatgaaagaactcaagtcatgagttgaacgattttaatgcctaaatacatgtatgactgaatttttgttatatgttagatttgggatcttacagtatatttaagatttaagatcttatagtatctcaggaagatagttccactgacatgaaaataactctgaactgtctcttttagaggatgtataagcattccatgttaacagaacttgcagtggcagttagaaaatattccagtcaaatttctggttttggagctgagtttattgcctgtttgttgtttgatcttattcaaatcatgtttttgttgtgttgtattaatatataaaagatttctgtgtctgccatgttagctgtttgtgtgtgtgtgtgtgtgtgtgtgtgtgtgtttaaacaacactccacagctgagctcttggaggaccaggcctattttgacagctccccttagtccatgtatcaccaagctcattctctgccaatacgttccacgtgattttgtggacatgtgtagcacgcctgtgcaacttgcaaacacccatacattattacaataataattgggttttgatgcaactggaactcagtactaccaagctgccagcatttccttttggctaccagtactaggcaggaaaattatagcctaactgtcttcctgtttattgataaacaaagtggccagcccagcaatggagcctgattagcagtttgcaccctttgtgaaaggataaacagaaccctactgttttctgtgtttgactgcaatttgcatctttaaagaggttggactgccctgagattcatgttcaacttgagtgcctggatgttctttgatatgttacatgtcagcctccttgttttcctctccttcatcttgaaacaatatttgccagagtttctctgttcccatctggcttaccataagcttccccatagtcacctatctgaagaaggagggagggaagaggcaggagaagaaacgtctctgtttcactgcgctcaaattttacattcccagaaggccctttaatgtcatctcaattccattttttgaagagatagtaatataagaatgaagaccaaaagacaaaagagaatctgcttactgctctctttggcccatgggatcatgtttgggctcgttccccctccatcatcttcactcactcagcaaaaagtgccttccccctttgtaaagtgaaatgtggtattagtcacctacctcaagtttggtgagtgttctgttctgaaatttattctaacctaattagattcttaaactaaatggtaacagagcaaatagttggctccctctgtaattattttccagtgaaagaaatgaagatcattttaattggaatttgcatgatgtaaaagagagtattaatacatgtaaacatccattaatctgtttaaacaaactttccccttaatccttaccgtatgtaaacaacatttgttttgccttagagatattgcatgattggacccacgagactccagttatcccactgaacagttacgttttataacttcaaaagaaatgttatatatttattggaggttgtagggtgttaagtgtagttagacataaattgtacctcagctattttgttaatgccaatagggattaaattagatttttatagctgctgtagaagtctatttggtagttaacaagtgggatttttaaatcctgggaaacataatcctattataacacaggcagctgaattaacataacccaggaagggactcttcgtggattagcattttttgacaataacaaagaaaatcatcaaattgtgtggggatattacatgcttttctcaaaagtaagaacagcgaattgggaaaaggaaacgagaaatggccaaacatgctatttcttagagaccgtttctttttaagggaaagacagtggaggctgggcagtaagctgaataaatgtctgctattttctgtgaagtcagtaatgctttttcagttattattaaactcttgaatctgagaattatagagctggaaagaactttgacatttatttaatttttatagtcctattcaaatatttacttcaaacacttcagaaagatggatatatctcacatatatacatatatacacatacatataaatatatacacgtatattgcatgatatacacacattcacacacacacacacatacacacacacttaatagtatatgagtggcctttttaaagaagagcctttcttaagtcttagcaattggttttcacatgctggtgagggtgattattagagcttgcaggacttgccaattttcatttgcacgggtatcatcttagcagataatcacatgggcatcaatcactggcatattattgtgttagataattgcatgggcatcaatcatgtgtgtatctggagcaagtcatcatgtgggcttcaatttcatctatctggaggaaggtaattgtgttggaagcagggaagggtgtgtctacatggcagataatcacatggggatcaatcacatagatatcgaggtagataatcctgtgcagatccatcacatgtaccaaagtggctaattacgtggatatcaatcatgtcaacaccctggttttctggtacaggttacacgtgaagcacacatgttgtgtgcctgcttatgtgggagaacaggtcagatgtcgcgtgcacccacccaggggcctgcagcggtgtggtgtgtgaggaagctgagccattcagagcgtggccttcctccacagagcgctggaaatgccatgattagggatcctgttgggattcttttattttaaggctttggctcctgccaaaaggaaatgttcctgggaggaacatgactgcatgtagaagaacgtgcagtttgtcgtcctcccctcactggcatctatttttccctccttcagaccttgcctcccaattccttctcacccacatggtttgggtgtggcttcagccccagtggagtctggggctcagggccaaccagtcagtgcactgcattccactggccaccatgattggttcaggccagaccacatgacttcagccagtccaatcagagtgaatatcaggctttttggggagaaatttaagggagagttcatttctctctgaattttacctgaggaggtgagattggcgctgctgctgcaaccagtgcctgggagaggctgatatgtccaggccccaacaaatggagccagaaatgaagccacctacagaaatcagatctgagaggtggagagaaatcctgtcctgaggatactgcttgggcctgatttcagcagtccctgaagcaaaatccctggcctggaaaggctcacctgagccaatacaatcccttttggcttaagacataattgtttggccgggtttggtagctcacgcctgtaatcccagcactttgggaggccgaggtgggtggatcacctgaggtcaggagttcgaggcaagcctggccaacatggtgaaactccgtctctgctaaaaatacaaaaattagcctggcatggtggcgcatgcctttagtcccagctactcaagaggctgaggcaggagaatcgcgtgagcccaggaggcagaggttgcagtgagccaagattgcaccactgaactccagcctgggcggcagagtgagaccctgtctcaaattaaaaaacaacaacaacaaaaaaaaaaaacaaaaaaaaaaaaacgtaattgggtttctgcccccttgcttcagaagaccctaactgataggataaaatcatctgagtctttcctgaagaacaaagtttcataggagcagccccagtaggggaaggagcagctctgagggtgtaagtgagggcagaaggggaagctgaggcttaaataacatcaccgtcgcccttagtataggccttgagctgctcttggcaactgtcaccaggtgccccccctccacacgtccctgttggagtgccccagtctcctggcctctaagcatctgagctcaagctgtgaggaacgtttgttaaagacttttaaatgcaggcttaatgttttcccttttccccctgcctattcttattactttgatatttatcaaatacagtttgtaatattaattacacattaatgttgaagtgcagttcccatcaccaaaataaatgaaaaaataggtgtcctcatggcaagaaccatactgttccaaggcattcttttattgccatttcagtagacagttggattttttttttatcagcctgaatgtgacatctgataattattgatttggaaagagataaaagttttggaaaagaaagtaatagaaaaaaaagaattctccttgaagttaaatagactatttcttggaaaagcaaaatgggagtttatatgctttgtctaccaaattctgtgtggctaacagcttgtgccttttctccttcagtttttattcttgttaatactgtcactttctgcgtatgctaaggtttataagaaggtaatgtgacagttgatagaaacacctagtaagaaaacacggccgggtgcagtggctcacacctgtaatcccaggactttgggaggccgaggcaggcggatcacctgaggtcaggagttcgagaccagcctgaccaacatggagaagccccttctctactaaaaatacaaaattagccaggcatggtggcgcatgcctgtaatcccagctactcgggagaccgaggcaggagaatctcttgaacctgataggcggaggttgcagtgagccaagatagcaccattgcactccagcctgggcaacaagagtgaaactccatctcaaaaaacaaaaaaacaaaaaaacacacatcactgaaatttacctagaatcttttttttagtccctttgggctgctgtaacaaaacactgtagattgggtggcttaaagaacaaacatttatttcttacagttctggaggctggtacatccaagatcaaggtgctggccagttcccagtgagggctttctcttcttggtttgcaagtggctgccttctttctgtatcctcacatgaccaagaaagaaatcatccccatcacattggggattagggcttccatgtaagaatttgggggggatatatttagtccatagcaatcttaaaacctcattttaatttaataattccaaactcttttttggttattattgttaaatttcactcaaactttagacatagcagaatgtagcacatttagtttgaaattcacttattttgggggggtccagactctagttgaagttcagataaacaataggatggctaatgggaaaggggggagctataatgcttcactcattcacagacctcatttcttaagtccctctcaccagtgcagtacacaagttctcacttgctgcaggtaaatatttgtgaaatgaatgcatgtatgaatgagtgactccataaatgactggtctctggctggaaggcatccccaggactttagatgggagtgtgagagatagacagtgtattctgcactccaagctgcttgtgtggtcttccctctgcccagcatccttgggtcttgctgggaacatcttaactcatgaggccttccaggactactcagactcagttatcttcctggctgtatattctacatgtgctatatgtactttctgttctgtaacatgcatcaaacctcaaatacacgtacagcgcttaccgttcacactagactggacactctgcaggcagggattgggtgtatattgccagcacccaacactttcccagcatgtgccacttcattactcttagtggaggtgggaatggcatgattgtggtggactctcaagatctatcccacttctctgtaaccaagcaaatcggtaactcatccaaactcaagggctaagtctgactagaccaacaaggggtaattcagccctccttgccagccctgacttttcatcaccagtgacagatgtggagtggccggctgaaggtttctaggaaggttttctttcctcttaagagaaggccatggcaaatcagtctttcctttctgctaacaatgacaaaaggatgtgttgctacagtcactaaggatagcttgccctagaacaaaggcaacattgtgggttggagagtaagtagagaatgaatgggcatccttgatgacactgctcagctgctggcttcaccagcccatcgctggatgttgtcacataaatgtcgttagtgtttaattaagccagtctgaatttgggtttccaatcttccagcccaatgtatcctaactgaaaaggaactgcagtggaaagcctatgggctttggtgtccaatacattggatttgattcttcttagcagtgtgaactgacctgactttcctaatatgtgtaatggagaaagtaatacttctcacctggggttgatgtgtggaacaaagaaaatatgtatgtaaaacacttaccagagtgcctaaaacacaaccaatgttgtttcttttccatttaggagatggttcacttgttgatctggggggtccagtgggttgaattgatcaacagtgaaatcagtaaactctctggtcctttgcacatgaactgtcaggtagttcaccgtctagtatgggagtcagatagacattcgcggtcacactaacagtggggttcgactgcagtcctaactggagaacagtgtccagctaacagaggttgagagtactgatcaaaccacacctgaaggctggagtgcaggtctcgtagccatgaactagagaacaagaaacagcggaagatgctgaggatgttaatactgaagaaaggacgaccagaaaacagaaacgacttcaaagagaaaagggagtggaatcgttctgtgctgcttcagagggtggagtgaggacagaccccatcaacaaaggacgcaagctttcactcaacaggagaaataactgtctgagaattagcagtgcacaaaggcagagagcgagcacctcatcaacaaagcagctccccttcccagcagccactcatcaggaagtcctgctgcaggagtttgggccacatggcccccaagggctcttgcaaagatctggatttgacattaaactgttcagcagactcttgttgtttgggctacagcaggtggatctagagagcttctctgttggttatactgttgctgttgtttttctgaattccctccgtcttttttctgacttcctctcttgttggccactataagcaccacccaaactgacctttcacctctaactgtttttttttccatgctcccttgatgatcagagagatcctatacatgaagacagagtaatgggatttgtgcagctgcagtgcagtttttagggaagcgaaaggctccctgccctgtagtcttcctgtctcgcctgcctttatacctgaaatgttcccttttccctcatctttcaactaaggcatcacctccagaaaatacttgataaatgtcaatatagtaactggtaagttgttaatatatcacctgtgagggataccatattaatgccatatgctttttaaaaaagtgataaaatatgcagaacatacattttaccatttaaaccatttttaactgtatagttcagtggcattaagaatattcacattgttgtataatcatcaccaccagcatctccagaacttttcatcttccccagcagagactttaccattcaacaataactccccatttccccctcccgtccctggcaactcccattctgctttctgtctatatgaatttgtctactctagatacctcatagaagtggaatcatgcagtatttgtccttttgtgactggcttatttcactccgcctattgtcttcaagattcatttgtgttatagtgtgtatcaaaatgtctttcctttttgaggctggatagtattccatggcatgtatataccacattttgcttatccgcttatctgtcaatagacacttgggttctttccactttcggctgttgtaaatattgttgccatgaacatgggtgtacacgtgtctgttcgagtccctgctttaattcttttgggtatatccccagaagtgggattgctggatcatccggtagttctttgtttaattttttgaggaattgccgtactgttaatagcatatactttaaaaacctatatgttaaccaaggagaagaaaacaagttaatttgaagagagtcagaaagcgtgagtgtccagagcctactgagccctggaagtcacggataaaaacaagaagtgaagtcaacactctcggtgagaaagggagcggtactgacaaacttctaccatcccagtgtgcccggttgctcccacgccctcaggatactaaagctgggaggaaggagggggtgggggaggggactcagagggagagctactgagtgcctgcagggattatttcgaggtgcttttgcatccattaacttatttaatcatcaaaacaactcagcaggtgcccttatttttatggacaagtcttgtcaggtacttaacatttttaatttttattgcttttaaaagcaatgaagaatatctttaagagggaagaaataattctgaatccaccaagctcacacaaaattcacctcagtactgccctattttcctttgctccctttgcagccataatttttacatggttgcgttgttgtcatttcattttctactttttaaattgctacagagatctttgtatttattattttaacagatgtatagtatgcatctaatgatttcacttcaattcagttaactattcccctaccattgaatatttagattgtcttcagtttttcactataattttataattgttttataacaagattttataattttagcaataaagagtttcatgtacataacttttttcctcttatacttatttctttagaatgcatttctaggactggaattaccaaatcaatgggtacaaacatttttgtgaattttgttatacactgctgaagtgttttataaaagggatgtttcaaaagtgattttttgaagattgataatacattttcaacagcaatactggagtataccagtgtctccacattaagtattacttttaactttgttttattacttagtatatatataagtatacttaattgttgccttaattagtttttaaaattaattgcatggtttccatatgcttagtaactgtgtttcatatgtattttgtctcattacaccttttacccagttatctgttggatgaccctagaagtattgcattgtaattaagaccaaacaccagaagcaaaggtagattcagttcttacttttgttacttccttaatcttgggcaagttaatatttcattttgttaagcctcagatttctgatctttgaaatcagaaacaaccatagtacctacttcattagattatttcagaggtcaaatgaggtaatgtgtctgaaccacttcagcacaatgcctggcacatggaatatgctccgtaaagattagatatcttcactgttattatgtagagccattcgtctgatttttcctcctcttaccatattctaaatcttctgttgtattacctcttacccttgggtagttgagctgctgggagttggaagtaagggcagtggagtttgttcagggcaaggcctgccatctggttcacacatgggtgtgatctggtcagactaaacagcattttaactccagatggctgtgtctacattctcgtgttatgtggacggatgatcaacagtggacttgcaggggtggaaggatgtacagagaccctattagagctaccctagtgcttccagttagagctggtgttcacacaagattgttgaggtagggctaccccattcgcaatggtattcaaggaggaaagtagcctcctgtctccagccagttcaaccttcactgctaattcctgtggctcctgctgcagctgcaaaccacaacccactgatttctcctcagatagagcaagaaggggcagaaagtccggtccacatctattcagaacttagtagttgataggtgcgttctttatgctttctcactgagatgtgtctccccgcatgtgcatgactaagccacgaaggtctgatttgacgcagaatccactggctggtattcagttatccataaggattgagagccagcacacccatgttcctggcagcattattcactgtagccaaaaggtcgaagcaacctaggtgcccgctcacagatgaacgggcaaacaaaatgcggtgtctttgtttttaaaaaggaaagatcttctgatacatgctacaacatggatgaaccctgagaatattacgctgagtgaaataagccagtcacaaaaggacaaatcctgtataattccacttacatgaggtactagaatcatcagattcatagagaaaggagaaagacagtttccaggggccgggggggaaggaggaacggggagtgtaggaagaggaaaaatgttctggtgatggacggtggtgatggttgcacaataagataaatgtacttactgccagtgtacactctaaagggtttaaaacagtaaattttatgttaggtatgtttcaccataataaaatattttttaaaaaggaaaaagaaaaataacttgggcctaatctaggatatgaagaatatgagaagagttaaaagaattttttaaaaattagcagcaacttgtgagagaaggttcctcctcaaagcggaggaaagaattaggatagattgtagtttagacccaagaaaaccaactctgttcaaagcatatgaacctgaagttccctgtggtcatggcaaccttgggaaggttcaggatcctcttggtttttgtttttgtttttgttgttgtttgtttgtttgtttttgaaatggggtctcactctgtcacccaggcttgagtgcagtggcgcaatcacagctcactgcagcgtggaccgcctgggctcaagcaattctcctgcctcagcctcctgagtagctgggaccacaggcccacacccccactccaggctcattttttgcatttttgtagagatggagtactgctgtgttgcccagactggtctcaaactcctgggctcaggcgatcagcctgcctcggcctcccaaagtgctgaggttttaggtgtgagctactgtgtctggcctaggatcctcttgtagaggaacggtcacctgagccctttgtgctggagaagatatctggcccataagcaactttagtcaccggagataatactataatttatagacttaaaaaaaaattatagacttaaaagcagtgttgaaatatttgaggtttttcttgttagattgagcttttgaaggacaagaaaatgactgtattaaattcatgaatatagttttgaaagtttaagggaatttaataaagtcgtaaatggtgccaattgaggtttcaacttgtttagatatattcaacctgaagtaatcaattttgtttataaatagaatgataacattggaggtggaggacaaaggcctaaggcaggtgaatttttgaattggtaattttaatgaatttaatattaacttaaaaaccaaagtaacccacatgatcttttccatgttgaaaagctgccttcatacatcaaatttcacattgacagctctgatcctggtccttcctattctaaagtacagttgctgacttatttgtgggtttctcccatgagtatgtaagctccttaaggccacaagcaagttcacgtcctgagcatctagcacagctggacacacacacaagacacttgtcagatggctgggggaggtggggtgggggaaaagaaattcttgaatttaccctggtactatatgcttgttaattgtttagacacacacctcccagcttcctatgacaatttccattttgatatctatttggacatttgctaaatgaagccatccacttattttaatgaattactatatttataataaatataatttaacaaataaattatggggagtattatttattttaatcgtcctgtagaactgtattcaagagtatctacacaaggggtgttcagtccttgtttgcctgcataactctcctgaacacaaaatgttacttctgggagcctcccttctgtgcatgaccagtgtcatgtggaagaccaccctctccgatggtgggctcaaggttctatgtctgaagtccagaggcacttcatttggatggcagcatcaagatttcaagcttggtaataaatgaagagagggttcccaaagtgtcttgtgaaagttgggggaaggcattccccttctgtgagacagagctgtgtcttcctgcctggcttcctcttttggcacctttcccctcatgggggaatggatcctgaagcgaagaaagggatggctgcaggccccttggctgtcacgctgttagcgattagctgttttcagcaattatgcccttccatcgagggtgtgacggctggcgcctctggtaatgagctgccttccaaggctccctcccggccttcacttgctgctctccttagtggcctcagagtctgctgacattattgccaatgtgacatgttcctcttggccaactcgggaagacatgccagtctgccagtgagagagcctgaaggaacttcaggagagaaacatgaagctggatgaagccaccaagcagacttgtccccagggaatggggacatcagctcatccatcccgactagctcaaaacgctcaagaataacctatgcccaagttttgctggcaagtggaaatgtccattctacattagaatagcataggaggatttttttattattatcacatgggagttacattgttggtgaagtcatactagctagataaatgattaactcggtaactcatcaaataatgattgagaaaccactttgtggcaacacaaggctatcactagaggtgacagaggtggggaaagtaagtgtagctcctctcctctccgggcttatggctggtgagacagacatacatcattccagtggccactcacatcaatgtttggttgtgaactgtcctatgtgatgggaagagaaaatacaagagagtgtaaaacaggactccagggtggagagagggaatccctgtggaaatgccatttgaactaggagctgaaggatggagaggaggtaactagacaaagtgtggggtacagtggggagtggagcagagagagaggctgtgggtggagggggaggcacatgccaaagccgaggggtgacaagaagctgggcactgccaagaaactgtgagaagcgaagcttggctggagcggccagagcccagggtcatgcaggatgagcctagagaggaaggcaggggcctggtgatcctggacttggactgcagtgaggattttagatgtattctaagggtaatggaaggctactaagggtttcaagcagcagagatatgtgtcttgcaaaatagcattctgaatgcagcagaatggatttgagctgggcaggtgtggacggggaggccatcaccatggtcaatgagaagagtggagggtgatgaggaagacagaggacatcagagactgaattccctttccttccttccctccttcccctccaaacgtagccctcctgtcagctccaaaaggcagaagtgggttctttttcttagaagaccattccagttttctaagcaaaattccgttctcttctccttcctaagaaagtttacaaagaaacagaagcctacaatcccatggcagataaaaaattttaggagagccacgttccggttctgaaggagcaaagacctcttccacacacacagtggaccctgtggtgccactctaaaacccatacctccaggcccattagaacccccaaagtgacctgatttccatcaatcccaaagccagccaagcaaggttacgtttataggactccctcctggtgacagtccagaaaacaataaaaacagatgcaagtcccactgtggtacagaagcccactttggaaaccagggggtcaagtgcccattatccaggtaagcaggctctccctaggagaccaaaaatgcatgtcaacatgccaagtggagaggggctggaagccacaggggccacctgggaagggaggcctcagccaggcagtaataataaaaccggacaatgccacagagctggcgtggctcagccaggagccagggaaggatgggggtgggaggaagggcctcccttcctccaaaatcaatgtccctgttaacttgggcagaagaaaatctgacagctctggaaacctgcccatctgatgagaaggaggaagctgagaagcggctggagccagagaaagcccagaaatggcaggcgggatcagttgcccattggggacctggtggcaggagctctctgcattgcttttactgacgcccaggaggacaggtgccactgccagtccccacacgacctccagctgcctcctaaagcagcccgcccctctgatgatcctggctggatttgttttatgaaaaatccacgaaacaaacagggcactcagcttctgaacccagttccctgggggctattccattttgttatctggaatataaccgactgagaggcaactggaataactgaaatctacagagaaatacaagtcttgacaagtttcaggaaaaaccacccttcttattgataaagcaataccagccaactagtcactgatatttatttaatgcctcccatatgaagagagtagcatgaatccacaatcctgtatccactattccaaaatccaaaaagctgaaaatcaaaagttttattattaagtttgcagccgacatattgggcagcaaagcctgacctaaactgctgtgagactgagacttcttcctcatagtgtgactgttcctacattttgctccaggttttggggaggggagatattaaatagactgtctaggtgccatctaaccattttaaagtccaaaaacttcttaagtccaaaacacatttgtctagagttttctaacaagggattgcacactcctattgttatgggtttgaggactcacagtccagtagaaaaacaagaaatcccagagaagactcaatagaaccctttgcactataaatattttatagacatatagatgtttggggttacagaattacataattcccttctgtgtagtctgagtacagtttccaatggagacagcctgcagtgaggaaaacatgggtttgggaatcagaaggtggctgggccagtattaaatgcccctgtggccttgggcaggacttttctcctccctggacctcatccataaaatgaaagaatgggacaagatgatttctacacacacttccggttttcagatttctgtgttctatgacctccctataggagggataaaggaccagggagcaagaagctcagaaaaggtctcttttccacatgaagtgggaaaaggaaaagcgtaatcacgtgctggaccctgactggagatggaagtaacaccagccggttaactggggtgactcatgtcaccagttatggaactactcagatccttgggtgctgagtgaccaatacccagcctctggatggtagcagccctggagacaagtggggccaagggggggccctgtcatgccaaagctgtgatatcacatactgctgaaattgatttggctccatttcctgcatacctagcagatttaccagattgtgaaaatgaatgttttctatgcgcgtggctgatttttgcatgcatctgttcactcatctaaaccttagttacatcctgctaggagaatgaaaggctataatttcttcttctttaatctggaatagttagaaacaccatgatttttgctttaaaattctgcaccaaaatggtgaaccatttttatttttgtctcaggaaaaaaaaatgaaatgatactgccgtatttttttctagatttgcaaatgatcctgaccttaatgggggtcccatgcctgagaacatggcccttggaatagaaatatccagtggaatgcaaacatgagtatctaaacatatcatttgcatctgacattaataagccctttctggctttcacgtttccattttagatgacagtgccgtcttcacatgtcaggggtcaagtgcaagaacagtaatactagtatttatttagtactttgcatttctggggtgcttttattgcccttaattagtaaaccacaaataatttctgctcagtagcttggtactgcaatcttcagtgttcatggggacagtgtgctgtagtgactaacaggatagactttggagtcagtcaaactcagatttgggctctgcctctgccactaacttactgactaaccacttaccacttactaacttaccactaactaactgacttcagcaagcttcggtgtcttcatctgtaaaatggggatagcgacaggcttgtcacacagagtggatatgaggattaaatcagaatatgcatgtaaaatgcttaacgtaatgcctgacagtagtactgtatatatatacttatatataagtgctccatatgccttccctgtaaactagatgttggatacgttgccgtccgcaagtccttctgcctctgagaatcacatcatagcccaataagctacttaaaatggaaaagtccataggccatccccgtggaccaaagtcctgccacctttctggactctgaactccctctccctttccttctccaactgccaaagcctcttcattcttcctacttcattttgcacagaaatttggtttctttcactaatcctttccagccttactctgagggctctctttccactcacaagtggcccaacaaggttttgtttgttttcttgttttaactgaacagaagatcattctttccaccctaagtttttctatacaaattatattgaagatgattattacaatgacattttcaaaaagacaattctctccctaaagaattccgatacctgcttttaaattgccattcccctctcctcatggtatagatattatagtttacaacaagcccaggttcaagggctggtaaacccactgaaaaatcaaagaactcacccaagatcatgtagtcagaaacagagactgaattcagggcatgggaacttaacctcctagagttttcccaaaagcattgtttgcccctttgaacatggaaacaaaaaatagggagaagaccagacacagtggcttataattgtaattcctgcactttgggaggccaaggcaagaggatcgcttgagcccaggagtttgagaccggcctgggcaacatggtgagagagatcccttctctgcaaaaaaattaaaaaactagccaggcatagtagcattcacctgtggccccagccacttgggaggctgagacaggaggactgcttgaacctaggaggtcaaggctgcagtaaactgtgagcacaccactgtattccagactgggcaacagaacaagaccctgtctcagaaaaaaaaaaaaaaaaggagtctgggcgtggtggctaaagcctataatcccagcactttgggaggctgaggcaggaggattgcttgagtccaaaagtttgagactggcctgggcaacatagtgagacctcatctctacaaaaaatcaaaaattagcccagcataatggtgcatgcctgtgggtcccagctgctcaggaagctgaggcaggagaatggagcccaggaggtcaagactgcggtgagccatgatcacaccactacacttagcttgggcaacagattgagaccccatctcaaagagcaagccagggtgggcctcttaaagcacaggtttcttgagtggtcccagaggtaacacaccccacatggtctcactctgcctctaggggaggcacttcagaacccactgttaatcaggacaaaggatccctccgtggaacaattctggggagctgcattcccaagaacagcagattaaaaatcaaatccgggaaaggagctaaaaccttgcgtgctgcaagatataactcatgtgtacgtgtttgtgaatggcgtgtggggatggtgcatggggatggtgtagatgaggggatggatggacctatgaaaagctcagagatctatcagagcaagcctgggcaaaatagcgagactccatctctaccaaaagaaaaaaattagccagatgtagcaaaagaaaaaataaatagctgggtatggtggcatgcacctgcagtccagctacttgcagggctgaggacagaggattccttgagctgaggagttcaagaccacagtgggcgatgatggcgccaccgcattccagcttgagtgacagagcaagaccttgtctctaaaaataaataaaaaattggccaggcacggtggctcaggcctgtaatcccaatactttgggaggccgaggcaggcggatcacttgaggccaggagttcaagacaaacatggtgaaacctcgtctctactaaaaatacaaaaattagccatgcatgattgtgtgcacctgtaatctcagctactctggaggctgaagcaggagagtcacttgaacccaagaggcagaggttgcagtgagccaagatcgcgccactgcactccagcctgggtgacggggagtgagagcctgtctcaaaaataataataattaactaaaatttaattaaaaattttaaaattttttgttaaagatctatcagcagagcagcctggctgcattttgtataggtacagttatccatacttcaattgtttctgaattccagtcaaacaacttaacatagtaattatattcgcaatgactaacttagtatttaccaagtgcccaaatgttcaaggcattgcactggttagatttggcagaggacagagaaatatgaaatagcaattttctttttcacattgtccagtctaagctctggctataacttctatatttggcataaacaacagtcaccagagaccaataagacttggtcatttgttctgatttgaactcatttgtttaacaaatgagaagatttaacatcaaaatgccaaccttgggacagatatctgttttccaagatgctgaagcttaccaccaaatgatattttgatgtgctatttaggatgtttttgcttgaaactggctctcaatgactgtgcccttacttttgctggtcaggagcacagtgaaattgctctgaaaacaagcaagtgtcttagaaccccaagaatgaggcagtagcctcgtaaaatgggccctgctatgacctgaatgtatgtgtcaccctcaaattcatgtgttgaaacctcaatgtgatggtatttggaagtggggcctttgaggagtgattaggtcatgagatggagcccacatgaactggactagcgcccatatgaaagaggctcctcagagctcccttgccccttgggccctgggtggacacagtgagaaagttccatctatgaaccaggaagcaagtcctcaccaaacaccgaatttgccagtgccttgatcttggacttcccagcctccagaactgtgagaaagaaatttttattgtttataagccacccagtctatggtattttgttatagaagcccacatggactaaggctcccaagaagataaatatgccaactgttttctagtgccttcaggctggggcttcatggaagtggtggggagcctgaacgtgcgctgcggatagggttttacttcctgctacccatcaaccatgggataatgcctgacaaagatgcgaatgaccccggaaatgtgagtgaaggccatgtaattatgtaggctttcactccttctttctcagccgattcagctcttagccagattctcttgttccatcaccaggttttatccctgctaactttctttccccaggaatgattttcattgagatcgtagtgtgtttcctcaaaagaagactagattgtaattgggtgtccttagatgtagaacaactctcctgtttagatttcaacatatatatctttagctttaatgtgtgtatgagagagagagaaaggagaggaaaggagacgagaggagaggagacgaaaggagaggggaggagagtggaggagagggaaagtgattaagagagagaagatgtgaaaacttaagcactggccgggtgcagtggctcacgcctgtaatcccagcactttgggaggccgaggcgggcggatcacgaggtcaggagattgagaccatcctggctaacacgaaaccccgtctctactaaaaatacaaaaacttagccgggcgtggtggcaggtgcctgtagtcccagctactcaggaggctgaggcaggagaatggcgtgaacccgggaggcagagcttgcagtgagcagagacggcgccactgcactccagcctgggcaacagagcgagactctgtctcaaaaaaaaaaaaaaaaaaagaaaagaaaaaagaaaagcactgagctaaagtaaagaaaaaccactgggcaggacatggtggctcatgcctataatcctagcacttcgggaggccaaggcaggaggattgcttgaacccaggagtttaagaccagtctcagcaacatggtgaaaccccatatctacaaaaaaattttaaaattagtcgggcgtggtggcacacacctctagtcttagctacatgggagtctgaggcaggaggatcgcttgagcctgggaggtcaaggctgcagtaagctgtgatcacaccactgcactcagcctgggtgacagagtgagaacttgtctcaaaaggaaggaaggaagagaaggaaggaaggaagggagggagggaagaagtgacggaagaagtgagggaaggaggaagggagaaaaaaaaaaggaaagacctggattccaattcttgccctatttctgatcagatatgagaacttatgtggcagagatcagtcagctggttaccagaacccatttcctcttcctcctggcacacagatctacttccacccctcctctgcagttatctgtcaccttaggattacactttggctgatagcatgtgagtagaaaggatgtttactacttctagctcctgcccacaaaacttttcactctctgtgttctttctccgtcctcgggttgattgttaatagagaaagactgtgggagttacgggttaaagatgataaagccactggcagccaggacccctgaagatcacatggagcagaaaacacacacacacacacacacacacacacacacacacacggacacacactgccacactgccactgatcagattcgacatgaacaggaaaggcactactattatgctaatcctctttaattgtggggtttctctgttacaacaactcatactgctggagctgaaatgtgttgcgaagtcattttaacctcttctgtttctatagctgtgatgtaggatttgctttttacaaagcttcacttaatccacttgagattgaaatgtggtgtgtgtaaaaaagctttccttattccatgttcttttccagcccttccctgggcgtttgtacttagttgcagtaacagtttaaatataattttacattagctctttttcacttagcacaccagaagcatttttccgcatctccacagtcttcataattataaatgttaatgactgcttaatattccatcaagctgatgcactgtaattgtctaaaacaagtgtgagatgttgctgttatatcctgctttgagaaaatccaacttatcaagacaaaaaaattctctacaaggggacttttatatattgagtgccttacgtttccaaggtataatttaaattacacaaatttaataggccaggcgtggtggctcacacctgtaattccagcactttgggaggctgaggcgggagaatcgcttgaggccaggagtttgaaaccagcctggtcaacataatatctctacaaaagaaaattttttaaaaaattagccaggtatggtagcacatgcctgtagttccagcttctggggaggctgaggcaggaggatcactggagcccaggaatttgaggctacagttaactatgattatgccactgcactccagtctgggtgacagtgaaaccctgtctcaaaaaaaaaattaatagaccctcagtcacctactatacagagcaaagtacttgtattatcactgggaaaaaatttatatatatatatatatatatatatatatatatatatatatatatatatataatatttgtcagggttgtctgggggacagaaccaataggatatatatagatatataagaggggatttattatgggaattggctaacgtggttagggaggctggaaagttctgcgatctgctgtctgcaaacggaagacctagaaaagcaggtggtgtgattcatctgaatccaaaagcctgagaaccagggaggccacatatgtaagtctccagatctgaaggccccgcagccaggagctctgaagtcaggaaaagatagatgccccaactcaggaagagcgagaatttgtcctttgcattctactcacctttttattctatttaagccctcaacagattggatgatgcctgcccaccttggtgagggcagatcttttttacttagtctattgattcgaatgctaatgtctcccaaaaacaccctcacaggtatacctaggaatgttttaccagtgatctgggcattccttagcccagccaagttgacacataaaattaaccatcacggatttatacctataaagttggacatttgcactcagtggctgctggttgcagagaatcccagcttccctaaagcagacctcacccaggtgattttccccaagtgtcgggccctctccatctgttgtcccatctatgctgtgtctcgcggaggctgctgtgtctgtttcttagcataggatgagggagctgacacttctgcatgagctcagaggtcaaagggcagtttgccttgtcaggtggcaaggcacctgggctttaaggtgaacattgcacacggtccgcccaggcactgaggagtgtctagggggcagtgagggggtcctgcactcccgtgcactcacacttatatttgcatccattgtttttgtacatgctcatatttaaaaatttttgtctttattgcacaaacaagagtgaaacaatcactcagaaacttaccatagtaacagcccagcaatcaatggactgcttccatatactctgtttgcctacctccccccgactccccacccccacccaaagaatgtctacctagctgtatttgtctgagacagttttgttttctcctttggtcctgtaaccctctgcagggatcattgtcatgttgcttcacagtctcaatcttaggacaagattaatattgcaccatctacattctcaccgttggagtagtcactctaacaatttgcagaaatatttaacccagaattcaccatctggatcaaaattctgacaatttgcatgtgtgtgctgggaaaaacatttaggtttcgtgtgaactcagattagaggagcggaaggagctcagctgttctccggtcgggatggcaccatgtgttgtttaaatgtgtgcattatcgtgagcgtccatcctgtgttattaagtgaaaatgtcttccaagaaggatccttagcatgttgtttcattgtttatgtacattaccatacatgtttaatatggcagagaaggaaaacataaattgtgtctactactgtacagtatcttatagtgtacaaaatgcaatgagtgcccattccatgttaaataattaggtgatttgtgttttaaatgctttatatgatgtagaaatactttatgtgatgtagaaactgcttggtggaagcaattaagctttctaatattatttgagggaattgattggggtttccggatgggctgggaacacagtaatcttggtcctattcctaataatggaatacaggctcccactatccaaacttaccattttcaggaatgggttagatttttggtactgagggatgtctatatttatcggtatcctcgacttggctttgagcatcataagatcaggaacttaatgtactcatctttggatgcccagcacctaaccgtgcctggcatttagttggtttaattcacattattctgtgactacaccaatgaacagatgtgtcacaatttatcaaaaattgctcctgttattggataaatatacacttaattttcttttctttgtttttcttttgatggaaaattaggctttttgctgtctgtgaagggcatagccaaggaattttgatgcgtgttgcaaggcacaccaagatactacatatatgtggtcaaagctctcctcttctccccagctctcacaggtctggcttagcccaatggtattgagtccagactcaggaggacttagttctcttcataaaaagttgatcacctttgctttctcctttgcatgggcaataaagaagtgaaaaataaattcccagtgagcttgcattctgcttgggaacaacatagcacatccattttctagagagctgtccagtccccatttgagggctgctagccacatgtcaagcaggaacccagagtataaccaggaaaatgtctgtggtagaccccagtgattcatgcctcccatctccacaccctcctgtagtcccctcccacgctgattctggactaggccacatggcttggccagtggaacacatgcaggcttgcacgtctggaactctgccacctaatttaggatcccagactctcctactggagacacaggtccttagtgacagtctgcaccaccattcagacaagtcagtagggccatcttagatcatccagccctagtcaagccaccagataactgtacccacataagtgacccctggcgagaccagcaggagaatcatgccaatgggccaatatacattctgacccacagtttcataataaaataaaatggttgtggttgtaagccactatgtttcagagtggtttgttacacagcaataaataactaatatagtaggcataccatcaagtccaaagtaggtagagaagaatgtaaatagcagagcaaaacagcatgactggtggctgggaggcttaaaactgggacaggatcagagtcatgaaagaagtcaaagaaatggttcagaagtaaggctgagactgacttacaaaagctgaaagtccctttaagttggtgtttggtgcattggcaggggcaggtatggtgacttaaaagagccatgctcaacaagatcaagcacaacacaatcacgggtcaccccagcagaccttagcgagtctagccatttctttggtggtggtcacagtcatgcttcagcccagtttccacttggacaaatggtacatattttcaatgagatgaaaattaagatacaatccatgtgctcagagagtgatcacagctctgactaaacactgtgccccaaagtgttgaggaattgggaaaacctagctgagttagtggtctcttttctgttacaataaagctcataatgaaaattagccttctttgttcttccccaagtctttctttctagacgaaactactttcaactgttttaacttccttactgttaacttccatatttctagatagtatggtcagactgttatttcttgacttttaaatgtaagatattatctactgacttccttctatgtaagatgaggattgagctctcttacccttctcccatttcctcatccttccaacataaatatattttgggattatatcaacattcaatgttacttaaagtgaccttgtaaatattttcacaactgagccatgtttgatttgtatacttatgtttactttactgtttttcctgaagttaataattgccttgaatttatttatttctttaaaaatgtttcattactcaggactgtagtttacattacgattctttgtgttatacagttgatgggtttcttttctttcttaatttctttaaaaaatagagatggggtcttactatattacccaggctggtcttgaagtcctgggctcaagtgatcttcctgtctcagcctaccaagtagctgagactataggtgcaaaaaagccactatacctggctagtttacaggttttaacaaatgcattatgccacgtatccattattacaggatcacacaagatattttcattaccctgaaagcatccctgtgttccaccaattcatcctgcctccatgagccgctggcaaccactgatctctatagttttgccttttctaaaatgtcatataattggaatcatacagtctgtagcattttcagactagcttttaaaatttggcaatatgcatttaaggttcctccttaaatgtgaagggcatagccaatgtggcttgatagctcatttctttttattggtgaatatttcattgtctggatgttccacagtttgtttatccattcacctattcaatttgctttttttctgtgtatctatcactaattcaatactggactctccaacagagccgtaaagtgtctttaaatacatcaagtaacctatatgttctatttttccccaacaagttgtcatccactgctccatctgagccgactgcccagtaaatcgttctggtagtttcccattctgtcatccaggtagtccttttgcctgatttctgagtcgggtcttttgcttattggatctcatgtctttttctttcttggtttattccttcattttactggagtacatcctctagtcacttccttggaaaagatatgggaaataattttgtaaaaaaagatttggcaggtctgcaagaaatatttattttatcctcacagatcaggcttttctagacttaaataagtcccagtagaaaaacgtcaggttgctggtggcttggcataagcatacttccaagagattccggaatggttggaattctattatttcttctctttttggtctaattttttctactagcttgaaagccttctgactaatagccccccccacccacccccagctaatccttttgtgaattggtttgaattggcctcacttcattagttgagcatgggaaatgttaacttctgtacagagatatgtattatagcataagaatggttatggtcacttgttagtatttctctccccacttttggattgaaacaattacagaataattagagcagagactatttctggcaaataaaacagttaatagttggaaaggtatgttttagtgaagattgtttataaacacacctcttgctgccaggatcttaaagtctaattaattagtatcagcccagcctgcctctcctcttctgtcacttgctttcatcttccttcatgtacacacacgcacactcacacgagcacacaccccttgttgtcttgccttttcttttcctctttatctcagtctgcacaagtttgcacacagaattggcttgcctcctagctgttttgtccccacactccatcaaaaaatattttctgcatctctaatttcatcaagatatgcctgactgagaatgtcaaaaccactgagcagaagtgtttaatccaaagttggctccgccggtgatgatcagctgaggaaacaacctcgaatttttccctcattatttgttaggatgtcagtttttcactttatggaataggttcacatcctgcttctcaccccctgccccccactcttcattgggcagaggcctcccactgatttccaatagagctctctgcacccaagaaagacacatggagaagaaatggtacctggccgtctgtgggtatgccaccttcaacaaagatgtccataagcagacagtcacttcatggtttcttggacaggcagatcctggccatgttcatgtaattccataaggtaaggctggagaggctgagctgcccacttaacaagcaacaagccctgggggagtctgggcagcccaaggtagaactaggggtggaagatccttgcttggccctcggatggctgtacgacgtcaggacaggctgttaacccctctgagcctcagtgccgtcctctgtaaaatgggaataatatcagctacctcctagggttgctacaaggataaaaaccaagtaagtgcgtgtgaatgccctttatcatgaatgagaaggtgccctgtaaatgttgcttattagctgaccttagagataagaatcaaaatgacacacttttgttccaggtagtttttcccctttggcttagtccccttttttatgagggatgatctgctgtttaaagcatttattaatataaagattatgaagggaaggatttagaatgtaattagtggggaagggggcctgcttctctgggatgagaacgccatgacttgttggctcagtacagcacactggtaatcttgtttcctgaggctctgcacacgctgagagcacatcgtgctcacaggcacacttagtgaatatctgagaatgtggtgagggagaacgtgtgtcaggaactgggcaggtgggcggcacagattgccattcctgcactggccgtgattgtagtaagtccctcatggacactggtagaacccgaatagacatcatcaaatggatgggtcttcctgcccgctgtttcagtttgcctcccagtcccctctctgcccaccatccgcacaagttgcagaatctgcagcctcaccccactggacaaagggctacagatctgccagtatatcgtaactcacatggtaggcagtggcttatgggatctttctagaagggagaaggccagactcttcagggcctgaaggcctgtatttaaatttcttcacagtttggaagaaagctactgtgatggtcaattttaagtgtcaacttagataggctatagtacccggttatttaatcaaacactagatgtttgattaaaaggaaggtattttgtgagtgtggtcaacactacagtcagttgatttatgtataggtggttgccctccataaggtgagtgggcttcctctgattagttgaaggtcctacaagcaaaactggggtttcctggaaaggaaaatctgcctcagaaccatgacatcaatgcctacctgagttttcagcctgccagcttgtcctgcagatttcagacttgtcaatccacagtctcatgagccaattacttaaaataagtctatctatgtatctgtgtatctcttatggatcctgtttctctggacagccctgactgatacagctgctctctatccagagattacctttttctttgactctattgcaatccaactctcagcagtccagaaaatgaaacattttcttttcactaggaaaaccaactgtgttactggaacaacaaaccaggcaaatgaatcccaaatcatagtccaactctgatcttgaaatctactaagctttgataaaactaagatacatattttatcttttaaaaatcttgatccattttacctcatcagaagtggggagttcaaatcatctgcattctaatcccatatctgtcttggttctcatcactgttcagcctctccttactccctgagatgctcgccctgttggaacacatgccccttggcgaggaatctccatacaccaccgagctggagttgtctcggggcccgaggcagtgggactcacgttgtaagctttaggtgtcaatgaaggtgtctttccttgaaagacactaaaacttgaaaaagttgtcatctcataattccaggtgccaagatcactcaggagagaaatgctcctccctgtttaagttattatttttatctccagggtcatttctggaacccttcatatacattttaatcactttaagtctgaatcacaaacattacaaggctcacctttggccattcccaggcagatgaggcagggtctgggttccgtgagtcatttaccacagactccagttggaagcagttcccagtggggttacgtgtgagccttttcaattgtccgtgactgtgttccgtatacacatatcgattcccctctctaattcccagagctagtgccctgcccttctgtctggcttgggtggagcccctgaggggtggggaaaggacctggcgccactgagcagacgtcccttaatggtaatcctccagtgagtcaatggcctccaaagagaccatgagcgtggtcttgttgatgaggaatgtagtcacagtcacacaaaaaagtccccagtctctgcctcaggaccccatgcatggcccatcatccccgctgcagaaagaaactggacaggacctccccttaggagcctgtcagcccttgtcagtaatcagcccaggggctactcagaatgactggaggcactcacatccaccccctaccaaccacactgcccgctctcagcccctgccacctggggagccccacaccagggcagggcaatcaagcttggcttctgcatgccgtgcaaagcttgccagcagccaagctcttgaaatatttatatttatacatgcaaggctcagactctcgctttgtcccgacaggcgccatcgtatgtggggatggggtatggttcgggagggttcattcatcccatgctagcgtgcctacccgccaaggctcacttgcgcagaggaggagggatctcaccagaatagtcaaaaagttggccattgtcatgaatcaaatccatgtgttggaagaaatatacattagaaaattgcatagtctccccttccctttgattcagagattttcgtttcatttgtgcacagggaagagttgaaatgcccctcctgaggggtgcccttctggggatgcaggacccacggattgcagggtgtacaaacacaatatatgtatttattttcaaagacaacatgaaataacaccatagagtttttgtggctacctgttctcttttgaagaactgttcaaaaactagatgatgggcaaaaactctatagaggggaaaggaggcaggaagagccacagtttcagctaagtcagacgggtgcactcgagactcaattagcaattgttcccatatatttcaacacacacaccttaaacacaggttttctgagtgaagtcagtgatgaaagcctgtgggttaggggaattttcccatggtagcgacagctgttcccacagaaacagctcaatttatctcagagatgaaggtttcactagcttgggcctctcatcaaattgcatgcatgggaattatttttaagcactctaaaatggtatcatttcctagtggcaaattatttgggtgtattttgaaactaattaaaagggaaatgtcctattttgtaaagagcagcatttctacattttaaaaatcagatgttctcagtggggagcagggttttctcttcgtcagtgttggctattgctaagtgcgtcccagattgaaaacctaaatgaaataactacaaggaaaggcatggggtaagcttatgttggaaaaggtggagggagacacacatatataatacatacaccatttatctgggaatttagaaagccttttcatgtcatctttttttctttcttgctcattgcttgttatttcactgtgagccttgcaaatatggagggcggcagaggtgccaggctccatcacggtgtccaaaaattggctttgtacatatgctgaattagagattggctggcagaagcagtgtgcagaccctagattggcagggattcctcgtgacggaagacagggctatgaacccacgggatgtactctgaagccagcagccatgcaacgtgctgcatccccacatgccaaaacctgttttcaaatacattcagaatctgcatcaggcatcagatcccacccaggtaacgccctccaaaactcgaatcccctttcctttctcatgaggaagggaatgtgttgaacctgtcacaggacagagatttgaaatttttcacccaaggctccaggtcattttagtcaccacctcttgtgaataggcaccgtagcatccaaggaggaaggtaggaatcttgcagatgcaaaccttcctgttttttttcttccttggaaataagcaaactgccaaggcggttctgatgcaggaagaatgaatgcagtgaaggaacacgttaagacagccggagcagggaagtccatgccaaaaagatccgccatctggggcttttttctcactgtgtcaaccagaaaatgcctctctcatgtacaagtagctagttggtggctttactcttcccaagagatctactttattttatgggcaatgatgagttttaataaaagcagggttgttgttgttgttgtcattactgatcttgggtttctggtttatcttagaattgagcactagaaaggaagtgaggagaattattttctagaccaataggtgcttttgactcaaatgatgacattggacacttctaggaacctttaaagtagggacattagctccagttacgtcacctttcctctaagggtacagtgaaggatcaggagctgaacaagctgacctcagtcccaatcaactccgaaatgtgacagctgattagagccttgcagcctttcaggtactgtttaatcatttactcgcttgagtgtataagctccgtgagagcggagagcctgtctgcccatagcacacactcaggaaatattgttgaatatgatcattgggttgatggtctcacggggtggcaccaagggggccagcatgtcaagcgtaattcacaccggagcaagctttgggtcacattctgaatcatatgtgatgtagtgaacaagctctcggatgggcttcaggggatgtgcgttcaagtcctggctctccccccggcatcagagtgaccttcagtcatttgttgatctctctctcggacttttgtctccttgtttctaaaatgactagataattgtagagctttcttcagccctaaaattctgtgattctgaaactcagccagtcatctaaaaatgcattttctgcatgatgaaagatatttattaggcctaagtggaagagccagcattcttgatgaaaagaattactctatgcacacatcctaaggacagtggtttagatcagtgccctcctggtagagatgaacaacacaacgggaaggacaggcactgacgcacataaagatgaggaggctgagcgtggttccaggcaccactgcggtatagaaagtggcacctagagccagccaaggacataaagatggacttggagacactggagcagtgtgggtgcccctcagcccaggaatgttgcagagaggagtcatatgtgagattagggttgccccaagttacctctaagttctgtccaactcaactactctgtgagtctgtgacagtccctagctctgtgtcctaggacacagtgacacccctagagatcttaccaaagacctcaaatagtccaggcactgttcctcttaagggatgtagagaggagagggagagatggaaaagggagaactcacctttgttaacatactgctttctaataactcttttaaagaagtgttcattccattgttcatggaatatgcttccagtcgtggattgcattgaaaagataagtccatgtcctaatccctgggacctgtgaatgtgaccttatttggaaaaatggtctttgccgatgaagttaaggatctcgagaaaagaccatcatggattatctgggtgggcccaaaatccaatgacaagtgtctttttaagagaaatcagagacacacagaggagaagacagacacagaagagaagtcagacacagaagagaagtcagacacagaggagaagacagacacagaggagaagggcacatgaaggaagaggcaggggttgggtggcggcagctgcagggactgccagcagccagcaggagctgcaggaggcaaggaggatccgctagagagggactgcgccctgcacacacctcaagtccacatttctgggctccagaactatgaaagaatacatttttgttgttttaagctgccaattttatggtcatttgttatggtggccctaagaaactaatacacctcagatatattatcattgataccattaatcaggagctgcaaggtctcttttcctaattaacatcatggttgttcttactaataataagaataaaagaactctcagggaggcaggtggagggagagcatcaggataaatagctaatgcatgctgggcctaatacctaggtgatgggttgataggtgcggcaaaccaccttggcacatgtttacctatgcaacaaacctgcacatatatcccggaacttaaaataaaatttaaaaaatgaacaaataaataaataaataaaataactctatcttaaaacacattaacaatattattgaagaataatattagatcttttgaagtaagcatttttttttgcccgtgtaatagctgtctgtaaatacccgcttcttgagtgaaccaccattttctttcttttttttttttttgtagaaggaaacacacgctaccagaaaaaaaggggccccattttgatatccctccatccctggccttgttttggtaactttgtttctgtaccagatccacactcaatcaacctgtctggtttagggtatttttagcttcatagagcaatagtatcaatacaattctgctgttttattatacatttatcaaacagttcactatctggtcttttggccagaatttcttggcctcttctcagagctctgtctcaatagatcttttgataactgttttccaacacagtcttcatttcaatgttagaatatgatgttaatgaatttactagcttccagtcgaggatgaatagcttacagtgtttgcggcaatattggatgtatttatttccaagggaatgatttttaacagcacattgtgttcttatttgcttttcacaatccagttccagcatctgagaaactttgctttgatggttgactcccattagggaaacactgaaaacaattatcctgtagtggtctcggttcttcctggcagctttgcatttccatggtgcgagaccactgggtcgtaccacttgtttctccctccacgtcctcaaatgatctcttaaaagaacccactttagacctcattgttaccttccctctacttctttttcttcttattgaattcaattcaacaacatgtattaaatacttacaacctggtacccaggtagaagaagccaacgtatagacagggcatgtcattggatagtgataagatctgatggggtgagtatctaggcaacttagactgggtgtggggttgaaccagcatatttaaatttatgtaaaaactgagaaacaccctgaaaaggacttttattgttggacataattctctagtcctgaagttatcattcaagggagttcaagaactcatcccttaagtggactgggcaagctggccatttaccacttgtcacagttagaattaggaacttggctttcatattatccattggtgtcacagagtgggaggaaaacatcagtaatggatccataggaccaccagtggaggcaaattgaatttgggatatgttatatcaaatctgttaaagggaaaaaaaagaaagaaaaggaggggagagaaggaagaaaagaaaaaataaaagaaaaaaacccaaaagaattcattatataaccattatatgttaatggtacagtttaagagattttgaagtattgtcatatatcatttcattaagtagtatatacatacatacatacatatatatatatatatatatatattttttttttttttttttttttttttttgagatggagtttcgctctttttgcccaggctggagtacaatggcacgatcttagctcactgcaacctccacctcccaggttcaagcgattctcctgcctcagcctcccaagtagctgggattacaggcacctgccaccacacctggctaattttttgtatttttagtagagacggggtttcaccatgttggccaggatggtctcgatctcttgacttcatgatccagctacctcagccttccaaagtgctgggattacaggcatgagccactgtgcccggccagtagtttatatttttattccaccaattcttattcttaaaggaaagaaggattaaataagccctaaatgttatattacattagaatctttgaattgctgccatagctacataatggtgtggaaagtagtaaacccatttttcccaacttatgggaaagtacaaactaaaaatgagtgaatgaattaatgcataaataagtcattagaactctgccatcagagtcctccagtcacctcccccaacacatactcaaagacagaaccatccctgagtgcctaggtatttggcactgccagagcccctgagcaccaaatgtgacaggaagcggggttaccgtgttgcttttttttttttttttttttttttttagatggagtctcactctgtcgccaggctagagtgcagtggcgcaatctcggctcactgcaacctccaactccctggttcaagtgcctggttcaagtgagtctccttcctcagcctcccgaatagctgggattcaggcacacaccaccacacccagctaatttttgaatttttagtagagatggggtttcactgtgttggccaggatggtctcggtctcctgatatcgtgatctgcccacctcagcctgccaaagtgctgggattacaggtgtgagtcaccatgcgcagccctgtgttgcttattttgaggacacctgggcacttccagccctgcctccttggaagtgggagggataactggcgagagaggtgggcatggctgagcatgcagtgggaggcagaacaaagccagagtcccacaggtaaccttctggccagtgcctggttcacgcagctttaaggtgctccaagaggactgggagacccctcaggaccacgggagccttgggagaaaataaagtaatgcctgccaaggtgccaagccagtgtcaagcaggtgggcccaggaagtaactcagtctcaacctgcttatgccaggactcctggtgagcccacagcctgggagggcatacgagtaggtcctgtcccataatagattactcagtcctgactcatatagggggcttatgagagaaggaatcctaaggccttcccaggtggcctgcaggagcctcaaagtcagcattgcagggaacactcattcccccttcctgaagtttctttccttcaggagggagctccactggtgcagtgctgtggttctcccaccccagcccacatctccgcagagccagggtgatgcacccagtggctatcctggcatatgtagctctgcctcctcctttttccttcctcgagggtgtgggctgcccacaggcagtgtgactgattccctgctccccggggcccactctctgccacacaggatgttctcggtcctctgcagcctgatgataagtcagtctaactctatggcccagtattaaaagaccatgtggctctttcactcacttctgtcctcaacccagcctttatcagaaatgaaggaaatgttctaattctcctcctgctgacacttttgtcttattgttcaattggttcagaattttgacggtcaagaggtgatgtgatcgagatcctaagcaaacacctctaaactaaaacaatcatgtacacttacccccaaattctacctattgttcttccctctattgttggaacacacctccctcttcctaacacacacagtgagaaagggaattctccaagatcagtaaaaagattgccaagtagtgccaaagcccagagcctgtctctctgtggttacctctttccagatgcttttcttgctcctgccactactctgttctcaccgtcgcctctaccctctatgagcggctgattcatctctgcttttgtgtcagcgtgcaggctaagctgctacaacagaaaagacacaaagcaacagcagctcaaaccaaatgaagtttatttctctctcacccaacagcacagaaagaggtagccgggtggtccaaggcaggtgggaagtgctcctcctccatgttcattcagagacccacgttgcgtctgccctgttgctctgacatcctcatctgcatggctgatgccggctcaccctaccatgtttgagttccagcatcggagatggaggaagagagagtggagggcaggtggcttccttttaagggttaaatgttgcctacaccacttctgttccattcgcatgctagctgcaagtgggtctgggatatgcaggctttaagaagtgccaaaactcaaaggaaaaggaagaatggttgctgtgagccatcagctgtctctgccacacccctgtgcaaccacatgtgatatctgcacatcaccctgcactgcatttttgcattgctctttattgcatttttgcatccccaggacctagaacagtgcctaacacagctgagtagttgaacagctgagtgaatgatgaaggcctttttcccccagcaagccaaatcccagacccaggtaagagtaaaacagaactaacagagacaagacttgaggatgctgtgaaggtatcactgtgcacagttaaccaggaagtccagggtaggtggtagattggcaagaaaatctgacagtgagctgaccgcccaggggccaggacttggaagacaggggaaggtaaaccagatgacaacgacaaggggcagctcagggaggagctgtcattagagaggtggatttcagggcttgagagttcgggatgaggcaattttgagaaaagtgaggccaaagtatgaccaagtcctcagggtgggtgttggggaacatgcagtcatgagatgggatttctcctggcgctgcttggagaagcttccagccgtgagtatgagggggacttgaaagggtgacacagtcagacagtgtggactctgccagggggagcgttggttggtgaggcgaaggaggacagagacgcagatctagaagatgtctccctctacccctggccctgcatacaggggagtgaggcgtttcttcccctggagagggtggtgacacaaagcaggacaaagccaagcctcagttccagcacacagagtggacagtgttccagggagtggctgcttatgtgagggaatttgtaaccttccagaagctacagtgcagtaaggtaggaggtagggccaggaggaaataggcccgcaccaaatgcaggtgtatgaagaatggacttaaccattgtcacagtgtctagtaactaccgattcagaggacaaagtcccagtttcagggctctgcatggtgatgccacggtgccacagtgtgatggattacagggatctgttaaaatacttatatgcactttcctatgtttaagctttttctataaaaagtatatattgcttttatagtcagaaaacaatgccacttaaatcattaaattcttccaagatggtggtgctagagagattatttcatttctgtggtccttgcttagctgtaaaaggagagttggaaccaaacaccgcatgttctcactcataggtgggaattgaacaatgagaacacatgaacacaggaaggggaacatcacacaccggggactgttgtggggtgggggaagggggagggatagcattaggagatacacctaatgctaaatgacaagttaatgggtgcagcacaccaacatggcacatgtatacatatgtaacaaacctgcacgttgtgcacatgtaccctaaaacttaaagtataataattaaaaaaaaaaggagagttggcctcagaggtccccacttaatgcatatcattgtcttcctgctcagctctcataggattcttgccttcagtgcacaggtgggaactggaaaaataagggtcagggccaggtgtggtggctcacatctgtaatcccagcactctgggaggccaagacaggaggatcgcttgagcccaggagtttgcgaccagcctgggcaacacagtgagatcctgtctatacaaaaagtaaagaaaaattaaccaggtatggtggcacacacctgtaccctcaactaattgtgggggtgaggtgggtggatcgtttgggcctggaaagttgaagctgcagtgagcaccgtaattgcatcactgcactccagcctgggtgacagagcgagaccctgtctcgaaaataaaataaaatgtttaaaaaacagtcatgatataggtcaccaaccaagagcagaaattatcatgatttcaagttgctttagccacaatatttgccagtagtgttgcaagtagaaatgtcacctagtaaaatggagctacctcgtggagatctgtgtgatgggaaaatgctctgtgaggattcatggcacgtgctcaaggggctgctgagttcctcttctcaggcaggtctttcttctctgtgctttgggcactgtttgcccaataggcgaggcatttatgtgtgcaccagcgcagcagcttttcaaccctggccgtccagcagggtcacaaggggagcctttagaagcacgtgtccgagccccaccacacacccatcaaaccaaataaagtggatatccccaagaagagtggagacagaaatctctacataccaaaacgtgtactaagcttcttaaccataaatgagaaacatttttgtaaattacaaatattattttttacatgatatctctggttttccctcctctctgtcaagtggttttaagttctcaaaatcccaatgcttttatatctgtgaatgcttcttgaatacagtttaaaaatgatagtttttatctattcttcaaatatgcataagtaattatatattagatgtatttataaaggtaaatattaagtttcagctaactttttaaaacataatttttatcaaaaatgacaaagattgaaagcttttatatttaaaactaagggatactcaaaacattagatattttgcattttcctaccataagatgcatagtaagttgacatattaggccagcaatatgttatttttattcaaaaagaagtaacaaaagtgagtatctctactgtttggaggaggggggttctttcgagataactgatcagaggagggttatacagagaatgttggatgttaaagccagaaagaaccttagagtttatcttgcatttgtagaaactgaggccccgatgcctacaatttttatctcagaaatgccaccgtgtgtggcatatttttcaaggcacataaaaatgggttgctgaaaaattctcaatccatgtattgtttttcagcttcagaagaatgctaacactgacttttgttaaatgctgtaatcttcccatattactataaattgtcaaacatttcacattctttttctttttttgaaacggagtctcatgctgtcacccaggctggagtgcagtggcgcaatcttggctcactgcaagctccgcctcccaggttcacgccattctcctgcctcagcctcccgagtagctgggactacaggtgtccgccaccacgcctggctaattttttgtgtgtgtttttagtagagacagggtttcactgtgttagccagtatggtctcaatctcctgacctcgtgatccacccgcctcggcctcccaaagtgctgggattacaggcgtgaaccacggcgcctggcctacatttcacattcttaaaagccttttggaaaactgagcaactggtattaagaatggttagatttgagaagactaccctaaagaccatattgttaagcatattgagcagatgaagagttacatttgtaatcaactaaacctttttatcaatctccatgtgagtcaacagtgtagccagccagccaggaattaatgcacttacaggtggggcatagcatctggaagagcagtgggagcgcctgctcagagtttagaaggggcatcaccaaacctgggtatgtccagagcagggcaactcaagagggcagaggatgttgaaagtgtatcagagggtttcagagagacaatgatcagaactaggagggttcgaagacagaagacccagggaaacatacggaccacacttacatatctgaaggtccatccagtggctgtgtttacacagaaacagatcatcagttgccaagaggatggcagggctcttgccttggccagagctcctgaggtaactatgaagactcttcccaactccaagactctgattctgtgattctcactccaggacctaacctgctgatgatgtttacaaaatacaagaaagaatcctagctatacgaatctgacagacatgaggaaataatgcttcgtgtgtgtgtgtgacacaccattgggtgtgtgtatgggtgacagagagacagaacagagtggtggggaggggcatggaattttaaaagattaatcttttaaaaattttttgtgggtacatagtaggtatatatatatttatggggtacatgagatactttgattcaggcatgcaaaaagcagtaatcacatcacggaaaatggggtatccatctccttcaagcctttatcctttgtattacaaacaatccagttatacccttctagttatttttaaatgtgcaattaaaaatagttaccctgctgtgctatcaaatacttggtcttattcattcatatttttttttgtactcattaaccaaccccacttccccacccacccacccgcactccccacaccccttcccagcctctggtaaccatccttctattctctatcttacaagcatatagttcccaggaagggtagctactctgtgccccaccccacgctgggaactctgagggcttcaaacacagtcccaacctcaatgtctgtctcatctatctggttatagagacaagactaacaaccctgcgatggtcagagacaccaggagacctcgggaactctgtccttgtggtcctcatcccttcattctcctcctgagcccttactctcctttccttaaaaaaaaaaaaaatcactatatacaattcacccatcttaatcataaccacctccattcaaaaaggttacatatgcaggccaggcacggtggctcatgcgtgtaatcccaatactttgggaggctgaggtgggaggatcactgggggccaagagttcaagaccagcctgggcaacatagcgacagcctgtctctattaaaaataaatttaacaaaaaccaaaaggccagatgcagtggctcacacctgtaatcccagcactttgggaggttgaggcaggggaattgcttgggcacaagagttagagaccagcctaggcaatatggcgaaaacctgtctctacaaaaaattagccaggcgtgggggcatgcgcctgtagtcccagctacctggaaggctgaagtggaaggatcacttgagcccaggaggtcaaggctgcagtgagctgtgatcgtaccactgcactccagtctgggtgacagagtgagacccttgtctcaaaaaaaaaaaaaaaaaaaaaaaaaaaaaagggttacatatgcatatgaaaaaaggcagaaaaccgtattccctactgccttcttagttaaacagtaccaaggtagtgtttgttgcccaaacatattaaatatggcttatgaagtcagcttacacgcagtccagatttacatccttttaaaatcatttctctcacctaaaccataacagcagcagatggacagaggaagaaatggaatgtggtcacattccatactaatattatgaagtactttcacactgcaatgagtaaaggaccatctgcaacctatagcctgtgtttctgctgagaaactgattccggacttaaggtttctaatttggaacaaaagcactgagcaggttgctctttgtaattttttatcgagaggtggagagcatactaggcctacctggattcctgaagaattcagcaacctgaagagcacggcgcacggaggaaagtagactctagatctttaagatctgatttcatacaaaatgagaggtctaaaactagatgccataggagagaaaaagtaatacgttttcctcacacatcttaaggttcgtgactgaggtacctataatgaaagacagattaacaggagaaaaacacatacatactttttttttttatttatttatttttaagacagtctcagcctgtcacccaggctgaagtgcagtggtgtagtctcagctcactgcaacctccgcctcccgggttcaagcaattctcctgcctcagcctcgcgagtagctggtactacaggcgcgtgccaccacgcctggctaatttttatatttttagtagagatggggtttcgccatgttggccaggctggtcttgaactcctgacctcaggtgatctgcctgcctcaggctcccaaagtgccggcatcacaggcgtgagccactgcgcccggccacacacattactttaagctttacgtgacaacgtgggaaccttcctaaataagacccaaagaaacaggaacacctatgtattttttttctttcttttcttttcttttcttttcctttttttttttttttttttctgagacagggtctcactttgtcaccgagggtggagtgcattggcttgatctcagctcactgcaacctccacctcccaggttcaagagattctcctgcctcagcctcctgagtagctgggattacaggtgcacaccaccacacccagggctaatttttatattttcaatagagacagggtttcaccatgttgaccaggctggtctccaattcctgacctcaggtgatctgcccaccttggcctccctaagtgctgggattacaggcgtgagccaccgtgcccagctggaacacctatgtatttttatgcttagatttgatgcaagtcgacagtcgtgtagaagtgtgattggatgagggggcatgatctagcagtaataaaccgaggggaatttggcaaggcctgtttgttcaggttcttcttggcatctctgtgtcttcaaggataaggatgttcctttcctttagggatagagagggcacctctggaatgaaagtttttgactgctttggggagaagggtgggggaaaggtgagagaaagaccttcctgcttctgctgttttctcaaatgtacattttgggtagtgtgtcctgaaccccatcaatgaacaggctgcctctcgttgtctgtgagttgatttgccccctctaggactctctcctggtgccaaaagactagcttcctgttctttccttttggtcaggcactagggacacaagagctataaataagctaccttcccagtcctcaatgtggtcagagtgctggtgtaaggacatctggttactgaaaacagggccaacctaatatgaactcagaaccaaccccaagtgggtgtgcacaggaaatgggagtttaaatctgtacagcccttttttttaaaaaaaaaagcaattttagtttacatgttaaaatagggatatattagccagaccatgtggtgtcagcctgtggtcccagctactctggaggctgtagcaggaggatccctcgagcccaggagtttgaggcagcagcaagctgtcatggtgcttataaatagccgctaccctccagtctgggcaacatagcaaaaccctatccctttgcggggggaaaaaaaggcatttttttttaacctaacatttattaaccacttacgttatatgatttcaatactcaccaacccttgagtcaagcactattcttatccccatctttcacatgaggaaactgaggcacagtgaggttaagagactgtccctgtctcgtacacaggcagccatcagcacagtgaggacttgaagcaggatggcttgcaggaggctgtgagagttggagcctcatggtcattcctttggagcctcagtgagcaggtaatttggcctggcatttccacttccaggatttgtcctaagggatcagtcagacaaaaggactctaagatgaatgttctgggatatttgttgcagctaggtttatcatctttcgggaatcagggcaactgtcacatccccaaagaagctgtcttgccaccttgtctcagtcgctacacccccatcactcctatcccattagttaattctgctatcttcatagtttcacagtctacaattgtttattggcttacttgtttcttagctgttttcctgactggaatataagttccatgtaggcagggagctgttctctccattacctaaaatggtagctgacacataaagcatattcagtaaatatttcttgaatgaaatgaacatattaatggcaaacagctggggaaaaattaatctttttttttttttttaagacagagccttgctctgtcacccaggctggagtgcagtggtatgatcttggctcactgcaacctctgcctcctggattcaagcgattctcctgcctcagcctcccacgtagctgagattacaggcgtgcgccaccacttctggctaatttttgtatatttagtagagatggggtttcgccctcttggccaggctggtctcgaactcctgacctcaggtgatctgcccacctcggcctcccaaagtgctgagattacaggtgtgagccaccatgcctggccaaaaaattaaatcttactccatagggaattggcctatccatgcaatagaatacttggaagtcattacaaatgattgtgcggatcatgtcgagcataaacagataccctgcctgtggctgagtaaaaaaggccggtgacagaatgcatgtgcagtgtggttgccgtactggccggggctgctggcagctaaccacagaatttcgtttactgagtgtaagcagaaaacaaaacagtttattacaggctatcgggtaactcaccgaccctcgagggtgtaaggaagggttctgcagacaaatgcaagattgggagcccaagatgggagttctgcctcacctcaagtgctgcctagttgtctggattccagagaagtctcctaacctctctgttcttcaggcagatgtggataataaaatctgtgctgtccacactgcaggactgttgtgagggcaaatgagatcacaggcatgaaagccctttgaaaagttagaagaggactgtgtatatattgacatcatcgttatcaggtgattttgaacgttggaacacatgtattttgtccccaagcccctggtgttggcacaccattgggacaccattggtcctctctgttagctgcctgcacatcactcagtgttaagatccccctggcagtggtctggataaaaaggccggtgattctggcagtcgtgtttgctaagcttgtcctcaaatcatcttcggtgtcctcttgtgacttcagtcactctccctgtggggtgacctgtgtctcagcttcgggcctgcccttctcttgaggcacactaatcttgccatcttcgaaaacaggctgttctcatctcgggtctacactgtggcagccacaaagctcggctttttccctgaaagtcttccccatagcctgagagctgacacctagcgcgtgggcattcaaagtcactgtcaaccagggcttcatgcatggttcaagccattgactaggtatcaaagaccggattcaatgaggttttaaatttccgtacaattccattttttccatcctctttttatgttttttaaaaatccttcattgcctacctaccatcagaggaaaacagcgttgtgatatgatgggggattttaaccaggtactaatattgtgaaagagaacgttagtggtcctgaaactaggcatatgttgtaaggtggggtgattttcccacttcctgtatgtccagaggcccttcctggcagaacttccagcccaggagactttcatcttcatctcgcatgaaggatacaatttcgttttgacgcacggtttagagaagccgttgaacgtccacacaatctgttatgctaaatcacacctggtgtctgcacagagaaggctctggcaagagtttttgccactgggaccaaggcctctgactcagaagccaaaacatggcagtgttgcagggcgcctggctcaacggcacgggaaattaacctgcttgttctcacgttaaatgctttatgaaaattcaccgggcgcaaaaagagggaagaaaacccaagtggttgtgcagtgcgcctgcctggcaccagtgaaggaatgaagctgcggaaaaagtcaatgtgaagagctggcaggaggagaaggtggaaagcgcgatggaaatcaaatgcggtgccagccacggcattgttttattagcatttgctcgaggaaaacatttaattatagaagatcggaagctcccagtgtttgtgagctaggtgacatgacgcaggctctgccacttgctccacgatacacatcttcagaggaactgtggcacaccgcgacaggctgcgaagagaagccacctcccgggggcctggtccttgctggggggcccttagctgtaacagcctctgttctccagcgatcctcagtctgccttttttaaaaaattaagtgtcctgctggccgtccttcttctccttcgttttctggtttttccacattatatttttcttttccttgttgatttttgaagaaaataaaattgacaaagaataggatggaaaagtactacccttaaaaatgcttatatatttgccacctaaaaaaaaaacaaagccatttttcagttatagttttctttgggaaataattaggaagcaaaacaaccaagaataaaaaaaaataaatgggggagcatgaggctgtagtgaactctgtttgtgcctgtgaatagccactgcactccagcctgggccagcagagcaagaccctgtctctacaaaatacataagtaaaataaatgatctaaaggactcagtatatatttaagcaacagaaatgaaaacatgcaaaggtggaaccaacattacgaatgttgatggatattaccaatattaccaaatattgtgtggagatttttttttttttttttttttttgagacggggtcttactctgtcacccaggctggagtgcagtgtcatgatctcagctcactgcaagctccgcctgtgtggagatattttttattcctttttgttttaaagccctgtctactttaaaaatagtttgtgaaaataatgatgcagtatcacgtacctgcaggaagtatttctttgtgttccattcctgccatcacatagctgattgtattacctgatttcttcattcgtgtctgccaggaagactaattaatgtgctgctgaatataaagaatccttgtttgggatgctgccctgccacacaaggcagtgcttcctccagaagacaagaagtcaaggactggcttctgccgctggctgaaattagcattggctcagtttgtttagttgcaaggctatgtgtgtcttgtcattagacatttatacttctgtggataaactttataatctacttatggagacaagattctttatgtcagcaccttagagaagtgttgtagaagcagttggcatgcagacaggagtctcctacagcaacgtgggcacagctgagtcggtcttaacccaccttagggcatcctcatacctgcccaactcatacctgcagaaattgatgatgggcagggaaataagtgttttcctccacagaaatgaaaaaaagtttgcttttttttaacaaattggtttttgatatctgtgtgaaggggacaatttggatcggcttccagtaatgtgtatcaggtcagctggagaactagagggagtcactggctgaaagatgttgtgaacatcactctaaactgctcaggccagggacaggtgacacgtctgttatctgatgtgtatctggaaccatggtaaggctgccccattaaattatgagccaatcactcttgatttaccgttaaaaagagtgaaaggctggcggaccctgccctgcacaggtaattcatggcacctttggaaaaaggcacgttttcatcctcataatgaagaaagctaggtacgaggtcctttgatgacactgttcccttttgcttgtttacttttattctcccacgcagactgagacccagcaggaggcttttaaaccaaaacagttaattacctcctctaacccggagaagtggggaaacataaatatagcgagttaagagggagagagcagctttgctcctgactgtactttgtaccagtcggttggggaaggcagctaccttctctttcctcactgagcccgggctaagcgagaccaattagaaggcacgtgccagggagtgggtccacatgctaccatactgttgggcttccagaattctttcagtgctctggagaggagcccacctgagaaacccacgtacagatacccattccaaagacaacattgagtagctttggggctctggaccctccttcgaaggaaggaactcttgggcaggtggagtgagcagggacccccaacttgaggatggatcctcccgaaggcaggcagggctgcagggcagcttctcagagatacttctcaactgagctgtgagtcatgacctgtcaccaccatggtcctttctccccaatggaacggagcgtcattccttgtgtctccaagccctgggctgcccctgcccttcagggctctccattgtctgcctgtctgtctgtctgcctgtctgtctgtctcctggttcaagctccctccctccatagcctcatatgtacaaatcatcaccttgctgtgttccctcactgttcctgccgctgccctgctgctgtcctttgcccatttctggctctctcacctcctctgcacttactgaaatcctgttcagtcttcagaggccacccgagtcccagactcccctcctccaacccccttctcagcttgaggtgccgtcccctgcttctaagtcccaagggccccaggatctgttccactgactccaactgttacttcacttctcattatatggggctttcatcgccacaactggatgataaattcccagacttcaacagggagtgatttatggatcttttccctatgtcccacacctgtccccagcacctggtgcagtggattgcatttaattaatccctctggataaaaagttttaaatgtaccagaccagcatcatcaggcagaatctgggcatggtattcaggaagttttctcttgggaatcacaaacattctttaaaaaagggcacatcccctgttacctaaatgccttcaagtatctggatgtttggccataagtacataaaacaaccagatgagtgattgtgtttttcagttttcctctggatccttctgccacctattccctgggacccctcggagacagtgggcaccactccccattcctctgcccacagattgtcccggctccctgtgccccttgctgccctgctagaaaccagaaattctaactttgcccctctgaggctgtgaaaacacagagtaaaagtgggaagagccatgagctagcagattccacaaccacagacaaatctgagcatggcggtggttaatagtattgggaaagatggctgagtaccgtggctcacgccgaaaatcccagcactttgggagaccgaggcaggcagatcacctgaggcttggagtttgagaccagcctggccaacgtggtgaaaccccatgtctactaaaaatacaaaaattagctgggcgtggtggcagtcacatgtaatcccagctacttgggaggctgaggctggagaatcgcttgaacccaggaggtggaggctgcagtgagccgagatcgtgccattacactccagcctaagagacacgtgagactccatctcaaaaaaagaaaaaagaaaaaaaaaacactattgagaaagacagtgtaagcttgtggtacgtaaatactctgtcttttttaaaagttgtgtgtagccgagtgtggtggtgcatgtctgtagtcccagttagtcgggaggccgtggtgggaggattgcttgagcccaggagtttaagaccagcctgggcaacatagtgagacactgtatctacaaaaaatacaaataattatctgggtatggtggtgcatgcctgtagtcacagctactcaggaggccaaggcgagcggattgctggggcctaggagttcgaggcagcagtgagccatgatcctgccactgcactccagcctggctgacacagcaagaccctgtctcttaaaaaaagtctgtgcaaagtgtacgtcaaagccacactactgaatcataaaacatcggcagtgcccgcccaccaagggcatcttctcagcaccagctccacattgtcctatgagtttgagtcagaggtgcctcagaggcccataaggatgcctgtcaaggtcttcgcagaaataccaaaggcctggcacatatagttaaggaaaatccaccaggaggagatggaaaaagggcaaggtaaagaggaggaagagaggggaaggtgacggatagggctatggcagcagagagccagcaccagccagttgccagtcagggccagggcaaggcagccaaggaggcagacagaagtaagccccttctttccactggagttttctctttcctgggaatttcattgtattttgttgaaaaataaggtgtgaaaatacaaaacaaaaatatcacgatccccccaatccacaccatatacaaatatatatactcaaaatgtattaaagacctaaatgttatagctaaaactattaaactcctagagaaagacataggtatatatctcatgaccttcgattaggcagtcagtggtctcaagatgatagcaaaagtgcaatcaacagaagaaaaatagataattggactttagtaaaattgtaacttctgtgcttcataggacaccatcaagaaaatgaaaagatagcttcagaatggaagaaaatattttcaagtcatctatctggtaaggatttgatatccagaatatctaaagaactgttattttgttgttgttataactcaacaacaaaaagacaaacaggcctgtttaaaagtgggcaagggacttgaatagacattatccaaagaagataaacagatggccaataagcacacacagagatgctcagcatcattagccattggagaaatgcaaaacaaaacccattgagcatgcacatcacaccactaggatggctgtgaccaaaaacaaaccctgtatcaataaaatagaaaatagcaagtgttggtgaggatgtggagaaatatgaatcctggtgcattgccgatgggaaggcaaaatggtacagccgctgtggaaaacagtttggcagttcctcaaaaagctaaacgcagaattactatatgatccagcaattctactcctaggtatatacccaaaagaattgaaaagagggactcaaagagaaacccatatgccaatgttcatagcagcattattcacaataaccaattgtgaaacaatccaaatgtctaccaacaaatgaatggataaacaaaatgtggaatagacataaaatggaatattattcagccataaaaaggaatgaagtttggatacatgctgtgacatgaatgaaccttaaaacattattatgcttagcgaaataaccagaaccaaagaacaagtattatttcactcataggaaatatatagaatagacaaattcatgggtacagaaagtaaattagaggttaccaggagctaggggcaggggaaaatagggagttgatgcttaatggttatggagtttctgtttgaggtgattagaagttttggaaataggccaggtgtggtggctcatgcctataatcccagcactttgggaggctgagtgggtcacctgaggtcaggagtttgagaccagcctggccaacatggcgaaaccctgcctctactaaaaatacaaaattagctgggtgtggtggtggatgcctgtaatcccagctactcgggaggctgaggcaggagaatcacttgagtacgggaggcggaggttgcagtgagccgagatcatgccattgcactccagcctgggcaacaagagtgaaagtccacctcaaaaaaaaaaaaaaaaaaaaaaaggtttggaaatagtggtgatggttgacaatgttgcataagtaattggtgccacattgtacatttaaagaagatttaaaaggaaaactttgttttatatatatattgcccccattttttaacgggctaaggatgtaaatagacagttcaccaaagtagatataaaaatggccaataagcacatgaaaggattctcaacatcattagtcatgagagaaacacaaatcaaaactacaatgagagaccacttggtgatacccacgaggatgactagaataagaaagacatgtggtagtaagtttcggcgagcatgtggagcagttggaaaggaaccctcaacacacagctggcaggagcagaaactggcttagccactttggaaaacagcggacagtttcttaaaaggtcagacatacagttaccatatgacccaggaattctactttctcttaagtatatgcccaagagaaatgaaaacctatgtccatataaaaacctgtattgaatgtccacggcagcatttctcataatagccacaaagtggaaaccagccaggtgtccattaactaacaatggacaaaatgtgacctatccatacaatagaatataatttggcaataaaaaagaataagtatggataggtgctacaacatgaatgaatcttgaaacatactaagtgaaagaaggcagtcagagaagactacctattgcatggttccatttatacattccagaataagcaaatctatagaggcagaaggtagaatagtggttgcctaggtctggagggttggggaaacgggagtgacttgctaagaagtatgaggtttcttttcggggtgatacataccttctttttttgttgtttttgagacagtcttgctttgtcatccagcctagaatgcagtggtgcaatcacagcttactgtagcctcaaactcctgggctcaagtgatcctcccactgcagcctcccaagcagctgagactacagctgtgtgccaccacgcctggcttatgttctaaaattgattgtggtaatggctgtacaactctatgaatacactaacagccactgaattgtacacttaggtaaactgtatgtcatgtgaactttatctcattaaagctgttatcaaaatcacaaacctaaaaataattttcaccaaaatgatttcccacaaataacaactaaagcgatgtttcagtcattaactagaatagtttttaactttttattgtggaaatattcaaatatatacaaatgtaaagagagtagtataaagaactcccatatactcatcaatcagctccaaaaattgtcagtgttttagggtgctttcccccctacactttattaaaaaaatttcaagcatcagaaaagttggaagattgtacagtagaaaccaatatactatacacacctcctatattctcccattaatgtttactctgcctgacttaatctgtatctgaccatccattcgtccctctctccatccatcgatttgctttgtattaatatatccatttcaaagtaaattgcagacagcagtacacttccccttaggtactcctgcatgcatatgaatgactagagttcaatatttgtttacagttctctttgtgtttttgaggtgaaatttatatacaatgaaatgcacaaatttaaagtatatgttctatgaattctgacaaatgtataggtttgcatgactcaaagccattgttctaacatctttaaaaaatatttttaattggttggagaccttcaaaacaaattcttttcataggtttattgtgttttagtgttggagttttttggtaaggttttctctttttcaattatatctctgaagggcagaaataccaattatatattataagctacccatctatacacatcctcagccttcttagtcttttgaatgaaagccaatttagcatttcactataaacctgtgttttaatgtatgtttcatgattaacatatcaaaaactttgctctgccaaaatctacattttcagagtaaacagggtgcctggcatgtaacgctttgtaagatgaatcagcacatacaattttaagccagttaacctacagtatgctcaatattgttataggttttctttttttcaaaaacaggcaaactaagttttctttttcatgtggaaaaaataacaggatagaaaactcaacactcaccttgcctgttgaaacatactaccaggttgtaataatctgagaattcatttgcctttttttttcagtgcagtcactacaacagtctctgatcattattacagtaaatttttacacatttatgagaaaaatccaatataattgactggtgaggatggtctatgtcctaagcaatgctgtttttaaatacaaattgataaaaagttatatgaaaaaggccgtccttaaatagaataaattcgttccgttttttattttaaaccaaacttgatcttgacattttcaataagattttcatagagatgctcctggggccttctgctaaaaatttggaccacttcatgcccgtgacatgacatcattttacacattagatgaaatgaaaatcagatgagatggacacattcagaagggatagaatttactgtcgtttttgaatacgtggcatggcaattgccttttgcaggatgaaaatattcattgtacttttctttcatcacaaatgttgtggatctccctggagtctagaaagtctttcctatttcttaattaccaaatcttgggtcgcacatagctttctcgttgttcctgttgcacccagggctgtctctgccatttcctctgaaaacaactatacattaacattcaaggtttgagtcgggggctgggaggcgaagggaaaggtgataattcagatgttatgaaactgtgataatgctattatttaaggcacttacttgggtatgtttatactttgtagttttataaataagcccaaggggctcctcttggttgtcacaatcccccttgaatctcgtatcctgtctgtctcatcctatccgacagtagaattgatgccgctctaatccctggaagtttggaactaatgaactgactgctgagctgccgccacggagcttggtcccaaactatactgtacttcacactcgatttattctccagatggcgagactgtgccgccctgccgcgagggaccacctcttccactggagtgtaaaagtggacggatgttgttttctttgcagatttgatcattctgagctagaaacttgcgaggatgattagttattagctttaatgggtgccaattgaaccaactgcacgcatattttctcctttaatttcagagtctgcaggttttggtgatggttgatttctccgctttcttacgtcaccagagcgtgtctcttccccaggtgataggaatccagtctctgaaatcatagcacgccttggttcctggcccagacagagtcacctaatacggtggcttatggataaggacaagtttattagccactggtccactgcactgagcagcatggcacgaaatatcgattgaatgcggcaactttgggaacaccattttttagaatgggggcctgcaaagattgtaatctgtgccaacttcctctatgacctgggcagagtccacctctggatcaaacatgatccagaacacgctatggtaattagtctcttcgaagttctaatgtaactgttgataaaggccttaattccattattcagtcatttccagcttgtcagatcttgggggacaagttcattccacagtgagaatggctcaccaaggctgtcctgtagtgttaacacatttagaatgcagtccctctcaaacctcattttaaacaacctgtattactcctaggatataaaagcccccataaaagctctttttggggtgaccgcttttaccttaatttcctttttctccttcctccaggaagcacttacctcccaatagtcgtagcaggtcaccctgagagcccttctgagagctggggtcagccaggcagcctcttgctaatccacctaagatggatattggagggatggtcagagccaaccaggagccaaagaaagagagaaagaaaaagaaggaaagtgtgaagcgtgaaggatgaggtggtggagatgagagagctgagagcgctgttagcaagaagtacagtgtgtgtggcagagagagggaaaaagagaataaaatgaacagaatttctttcttttcacaactgggtggactgtgactctctcgaactgaacacccagaactaaacttaattgttcttagaaactgccttcctcccaacccaacagatggcatgggcgtgtttgctagcacagtcaaatacttcaccctgaaaataccaaaaagaaaaaaaaaaattcaacatgctcgctggttggggtaaattcactgaagttgttgagtgttttgggatatataccagagggatgcacacttggtttatgtaaattgtaacaagcaacagccggttaataagggtgtcgtatggcaacttacctcaaaagccatcctctgtttttggaaatgtacagaatgatgaagtgtaaagagcttggtttccattctgagccaaaattttttaaatgctgagtattcactgctcattattataatatgaaaagtactaatcagattatgcctaaaattggaagtaggtacttcatttgcagccaatttcacaagggccgaattttgctaagtaaactggaatgtgctgaaaccatggcaatccgactttagataaaaatcaaacaggtttagaacatgagctttgaacaaacaagtcccttcaaatccaagtgaaaccaaacagcttcaagatcagattttgtttgacaccagccaacattaacaatttaggaagttgatgttgccagggatcctgcgttcttgagcacacatgcagattagaggatggagatgatgactcaaataatttaagctttaaaatgcagtatggcctaaaaaactgagtgagttcccttcaattttccattcatactgtcccagtagactctttgcaaggctgacttagctattaaaagggaacctggaagtcacattgacaaactccagcaatcttatctcgtttttttgtagctgcataggctacacagagaagaacatgctttaggttctccacagccatggatctaaatgtgccttccaaaaagctgaaagtatttcagttttttggtttgtttgttttcgcttttgagatggagtctcgctctgtgtcctatgctggagtgcagaggtacagtctcggctcactgcaacctctacctcctgggttcaaacgattctcctgcctcagcctcccgagtagctggaactacaggtatgtgccactacacccggctaatttttgcatttttagtagagatggggtttcaccatgttggccaggctggtcttgaactcttgacctcaggtgatccaccccctcagcctctcaaagggctgggattacaggtgtgaggcaccatgcccagccagagctcaagtatttctcccagcagctctagacagctttagagccaagatactgagccaacttctgctcttcacctttaagattttcgtatttagggccgggcaccgtggctcacacctgtaatcccagcactttgggaggctgaggcgggtggatcacctgagatcaggagttcaaggtcagcctggccaacacagtgaaaccctgtctctactaaaaatacaaaaattagctgggtgtggtggcgggtgcctgtagtcctagctactcagggggctgaggcaggagaatcacttgaactcaggaggcagagattgcagtgagccgagattgcgccactgcactccagcctgggtgacagagtgagactgtgtctcaaaaaaaagagaagattttcgtatttaatggctgtaataaagaatgcatggtagagcaagtgggcgagttttatatctatggaataaaacaaaggtatgatgtggaaccaagccattgctggctgcatcatctctgactttagctagtctgagctctctcttgcttttgtctaagttggcctaattattggcagatgaagctctgtaaatcaggacttcacagagcagtcctaaactgtcttaggtactcttcccatctgacccgacaactctaagctaccgtttcctcacattgtttaactcagaccacatttggaagcattccttgcttctccccgctcatagacccacatctgtctggtttaaatctgctgtcctgggttgtcttgttgctgggacttagactcaatatttggcttaaataattcttttttgtctctgctttggtttgctattttcctagatcagtattgcttttcaaatggttatatattattgagaccttttttgtaaactacattcatcagcagtgagaagctttaaagttttattagtatcataaaaacccttcccaaatgaaactacttttgataagtgttcattctgacaatgagaatttgttgagggctgttggcaagttggaggagttggcttttgaaactgaaattggcaggaagtaatgacccccagtgctttctttctcttgactccagcctcaccctttccatgcacttctttctctccccaaccccaccttcattgcccccaagccaaagccaagaaataacatacttggtttcatatagtttttctggggacaattcaaatactgaagcagactttcagcctttcagcttttctgaactgtggagcaaagcctgtcaagtcaaagaaaaaaaaagtatttgtcaagcacttcatgaagggattccttgccttccacctgaagaagtgggagcttttcttgtagtacacattgtcagattcctgtgagcatcttcttaattgaatgtcaagattcaactcagttgcaaaaaaatagtgagtaaaaaaagcatgatgcctgtggaaaaagaaaaatccttattttttccctaatgtgaagaagctgacagacgagatggccacaatctagatgttagccaatttcttatgtttattaaatgagaaagtgcagggaaagaacatagaaccatgcttagcacttaatgctcaatcagtgaaaacttacccattaactattttccccttcccattgggaagtaatgctaatgagaaagacgacacttccatacagaagcacacccatgtgcactgcggtgcgtctcggctatgttatagctatcgcgaatgaaacctaaaaatcaactgctcacctttcagactggatgactcctttcaaatattatttatttggtggacaggaaatgtgtagatagaataatggtgctcagactctgaatccacataacagtttcatcaaccatttgatggtgctcccctcaatgataaaaataaacaataaactttttattgacacttacagaatgaagctcgactgagaattgtaaaaactcttgaagacattgatctgggccctactgaaaaatgtgtgagagtcaactcagtttccagtggtctggcggaagaagacctagagacccttttgcaatcccgggtccttccttccagcctgatgctaccaaaggtggaaagtcctgaagaaatccagtgggtgagtagctaatgctttgccttaagactcaggagcagctaaggaggagtagcaggaagaagggatctgggtgccacaggtttggaaaatgcatgcagagagcagagaggaagggaattgagaaaaagcagtaagctcaagtatccgtttcttttacacaaggaaaactcgcctttgcccaaagtgttctatgaaacaactgcacttttgaaatgatgcttcgcttcctaattggatgtgtggtttggccagaacagcctcctcagtagccctcccagagtaatccctggaaactaggttgcccgagaatctcatcccttcctccaccctgcccggccctaagccaaggcctccacctggaagagcagtgacgtaaatggcccttactgagattcatctgaaatcatcccaggcagggagggcacatttgccgcatatgaaaaaatgaacccaaagaaggggaggaaaaggtcactctttagggcaactggaggaatgaacaggaagcttttaactagtggtttcaattagcactgatattatttcctgaacagttctctagtgcatcctttttaaattgctgacaggtgtgtttgtgtttcatgacagacttttcagccaataaaaacctgaaatgtaaagtggttggcatgtcaaattacttaagaaaacttttgaaataggcctaattacactatgattgttttaattgacaaagggtggaggggctagattttatttgagggtcgctattattctgcagatctctactgaataaaataacatttcactgtgttgttctgggacagaaaatgtgtcattctgggccctgtgaggtgtgaaaactggaagcgtttgtggtcggggcgagtgggcagtggtggtttcatggaagccacatctagtattatctctgaggctgtggctgccaccacagcaataccctgagttgttgtaacacctacgaaactgctcacctgctgaatgcacccgatgtgtgaggtctgcgttgcccagtgccacggccactatgacatgtggcttctgagcattgaaacgtggccagcacaaatggagatgtgctggaagtgcaaaatacacactcgattttgaagactcgggactcactgaggggacaaaaagagaatgtaaactatctcgataatttttatattgattacacattgaaataatatttgggatctattgggctaaatacaagatactattaaaattaaattcacctgtttcagtttaccctcaatgtagctacgagataatttaaaattattatatgtagctgctgctatacagtttcttttggacagctctgtgttggatccttcttgaagacccgtattcaaggaccagttatttattgactaagctggagttcttctctccagggttaccctcagaagctgggagatactagttaagagtatgttaatatcctggagggtcctgagcccattcagatatgtcttaagttgattgaaatggactctgaagtcactgttcccttttggtttcatagttaatgcctatttatcaccgttattacctttaacttaagatgggggagggggagacccagccagccttccgctatggcttctgttcactgttttaaatccttggaagtgagacacatacagaaatttaaatagaacttctagttaacagaagtccttttggctgtttattttttcctctccgtttgtatttatgcgaagcataaaacccagagcctgatgcacaactgaaagatgggcttacttgttttcttttgtgtgagaatctcttgctcgccttttgtcgctagtgtgggttcttgtttgactggcacggcttattggactataacaagcgtaaccctgcctcctttgtcatgggacaattctcccacaaatcccgaacagtgtgcattcttccaacacactattgggtgtgcactggaattgaaagaatcgctgagccctgctacttcatctcctccccaatctctttgtgatttctcccccttcttctcctccccctaccccagtcccctccacctcgctgaaatgaacactttaccaggccggaaacatttaatcgtctccttttgaaaaaattaattgaaacttctccactagttaccttttgtgttagtacttagtgcaattttttaagaaagagggggaggaggaggaggaggaggatgggctagaatatttaatttttaaatgcccctattggcttaaaaacaaaaggcattggggtgttctcactaagaacagggaatatattgtaaagtgttgacttggttttaaagtccatgatttttgtagttataactgtcatcacaaagaatggggcaagtcacttcacaagttttcttttttaatgagaaaaaatatccctactacatttttaacaccaaaaccactaatactgtgctaccactttctagcataaatgagaaataaattatattttattttcatctacatcaaatactatacattttatccccttaaattgtcaccccctgctccttcttgctattttggttgagttattccttcccttgaaaagttactaaggaggtgatgatgatgccctttgaagggggggcagtgggagcaactgggaataattcttcattactgaaagctgtgatttattttagcctaattgtaaagttactgcaaattgctcaaaagctttttaaagatcccagtgattagattttttaggggggtggtgcaccggcaaggagggggcagctagaaggggaaataacacctctaatcccgcttctggtaaataggctgccagcttttcaaatgagtttcctttctattagtcagaatattatgctaagccttaagcattagtttttttatgttgccatagcagccttattcctgcagggtggtgacctgtgatgattacagtacaaagcttatagggtcttgaaaccccctttgaagatgaaaagtctttgatggtttatatttatgcaaatctcttagatatgatttacccaactgagactgaatggagagatgattaaaattcccttttcctttgatatctattaatggctgaatattccttaaatttaaaatggatatatatgttttcatctttatttacaaaaatacctttatcatacctgtgtttcttctctatctatctccccacatcttattagatctagatagacataatagatttacaatttagagtgtgtttttttcccccttttgaagagggggaggaatctgggcaagagcttttgtatgtttccagatgatagattttggaatttgggctaccccactggcagcacagagctagctgtgaactggtctcatggaaaaaattggcgagctttggtcttcaaagaattaaacttcctttttaaggtcttcctaggtaagctaaaaaattatgaagaaaaaccttctgaacaaagggtaatggtgctataatgaataatatggactccacgtagaaggctgctgaacagttgcactgatgtcagtgctgggcacgaaacaaaaacagaatggcaggtagaggaagagttcattgttttaagggcctaccatttgcatttaacgaagcgagggcaagaggtcttaagtaaatgcgttttcagggaaagcgtttatactctctccttccagttctaactcctaggcctcaagttgctcctttgggagaaaaaaattgtaatgcttaggattttactatttagtttggtgggaacttcattacctttttctttggactttcttcttatttttttaaaaaaattcttttgtgtggacgaaagaggcttggatattacttcctcaggtcaaagacttaaatactacttctgggtctacatttccgtgattgtacattttttccccactaatcacctatgacacttctgattttagtttgcagacaaattttcattccacttaaaaggccgaaaacttgaacaaccaatgaatttaatcccttttgtggaaactgcaatgggtttgctcaattttaaggtaaggaagccataatacggttaataagttagcattttatttatcacctaaagagaacttttgctttcaattttaacatcttcttaaaatgtgtttctagaaagatttataagcaaaggaaatgttgagcaccatttgttatctgtaatagtccaaaaaccaggttgccagcatcttagaaaacaatgaaatcagttaggtagaaggaaaagcttcccagtccaaaatatttaaatgaagcatttgtatattcctagtaacaattttaactaatcactgtgtaattatatgctttgaattattgcatttatagactaaatgtacatgaaaatttgtcacccttatgaattaactttgaaatgttcttttctatcaaatgtcttttcagtgggaaatgttctgccctctctgtagcaacattatcagtaatgtctagcagagaagattattgtttgtaagttcatgcacacaaataatttgcagtacagtttttcagtttgccacattagaatatcttctaatatacatgcgggaatattggctgagccaagtgttttcagccgttgtgtggttgcactaaactaccggtcttaacaaattcagagctagctcgttttttctcgtttatcagggggcatttatattattttccaaaatatgcctctcattccacctgacctgcgaacatcaatctagcaccccctttcagagttcctagattcccttcccccaccccagcccccacagagggcaggagaaaagaaatcactaaaaacaacagaaaaaacatagtcgaactgtactggagagagaatgtgtgagcggcaactttgaggccttgggatgtgcagaaggggtcgagtgcaaatgtttggggacctgcttcaaaccttgtcctgtgagcagcttgtttacacaactaaccatacattcttccagccagccccagaatcctgagaatataatcaaaagcatatccctaagatgcaaccagattcatccagtgatttaattttaagcactgcttcgccattttattccataatgtacttagaagcacttacaatgtctgaaattaatcaacagtgtccccaccggttcctcgtttctttcccacccacgtatattattagcaggttatatctccacctttcaagattcacggttatgtctacgacgaatggtatttgccttgactttcatatataaatgtcgaagttgctttatgaacacatcttggatgacttgttgcatttttattttcccctccggagttgcaggtttttgtgctgtctttaatcctgagaccatgtgcttgatcctaatgcaaataattcaattagtttgattttaaaattccttccttctcccctgtggttttacgagagtctcttaaagcaaaaacgaattctggaaagatataaataacttatagtgcaagcaaaatgagttaactcaaagtttctccaaaaatgagatgaactacaatttgaacattataactatattcatataatccattaaacaaagcaaatatatacaatatacttatcttggatgatattaaataccttttgaaaggggtaaatttgggctgcgtttttaggactgctttcagccaaactgtgttaagagtcaggtcgtcctgttactgaaatgcaccgtgcctcttccctctgacgcacgcgtttccgtgagacttagttctgttctgctcttttacaggcagtgtgtgaagaaaccctgaaggtcgggcctcaagtaggtctctttctagatgcagtcgtttttggaggagaagactttcgagccagcataggtgtcaaagacatctctctctctctttttctgtgtgtgtgtgtgtatatgtgtgtatatattttttctttgcccctcaaggatggacatttacataacaatgtatatttgccaaccatgacaatggtttttcatgacaatggaatggacactacttcctgataatttagggctcctcatagctgccctgcttctagagcactgcattattacttctgttcatttataaaagacacgagcaatagaaagcctgttgcagccccaggcatgctcaggaatatatggcatctcctttgctcctaataaatatattatgtgaacagcctcaccgttgcttcagtattttgttttcatatcagtctgtgggctgtctagatttctaacgcaaatttaaggcaatttcacatttgccttaatgaattgttttctacagaatatgcggtaggtaaatattattttaaatggatcttaaatttctcttacaatatgtttcgaactcttagtattaaatgtgctgattttcaccgattctcaccatcccttgtgagctgcacttgaggggtctgcatgtttgactggagaccgtgaagcatttagaaaagaggccgaggccacagaaaccagccccagtgacctgaagacaggcactttccctaggcagggagtggcatgttccaaatgtaaacagggacacttccctcccctcagggtgaaaaaactgaatttatttgaatacgagtctttccaggagacttgtgtatccaacggttcagcgggctacagaaggcatatcgatgctttccagccctctcaaaacaagtgccctcccgtctccccaagttctccatccagacagaccctgaagctgaagcatttggctcagaacttcagtttggacagggcaatcgcagcacacacagttctgtgcttgctgtgaaacacgaaccattgccctgcatagctgctgggccaccctttgtggtgctgtctttggactggcacttttcaagcgatgataagaaggaaaaaaatatatcaggagtcccttgcgaccctgacccagcctcccagaatggggaaggggccttctcttaatgcaggtagaagtaattctattgaaagatgccttgtcagttaaacagacacattcgaggtttaacttggcctccacgcgtccctgtcttcatttgtatttcaataattttattttgcggaggagcaatttccagggaggtttagatatctgtacaaactgaggttttataataaatatctgggtgcggtttccaaagttaaagcctcctttttctgttaacatcccattttcaggtgcaacaagtagtaaagaaaccctggatattctctacgcccggcaaaagattgttgtcatagcgaaagcctttggtctccaagccatagatctggtgtacattgactttcgagatggagctgggctgcttagacagtcacgagaaggagccgccatgggcttcactggtatgattcctgtcttagaaagcagtgtctaaattagcaagcattccagaaaaatagaaatttgacccgaaaacacccctaatctcatcagatatctcccatacttactccactatttgaaatatgagcaagtcacacaggggaagaacttgccagacacattgtcatggttttccttggccctgcaagtcaacaaatcactcattttatttcctctttatattagttgcttttttttttttctctccatcctcttaatcattttgttgtagtcttggctgacctgtagggagggatgaggctgctcaaaaagtgtttttgagtgaaccgccataagaattttggttgatggacagaagaaaaatctcctagaatatccaaaatttaattcatttctgaaaaaaaatgttggtgatattgtctttggtttttgttttgttttttactcataactagttttttgctcttctgccactccaagcccctcctctctctcccacctcccagtaagtgtccgtgtacctggcgacacctacgggcataggctggcactaggatcagcgggtcccttgcagtccggtctggggcacaggcgggtatctgttgattggtgtgcctggtcactcaggtccccatgagccaggggagcaacagaaaattgtgtttttacaacagagatctatttttcgaaaaaccacaataggagtctacacacaaacatacacatggagttgcacacacacaaactgacaaccatgggaaaaacacagtgcactccttcactcttacctgttcttctgttgttgaaagttctaagaatattaatatcagaaaggcacccgaataattaggaaaagagacgagcatcctgatattcctgttataactgtttttgaaatatatctaggtagcggttaccgaaagaaaggtttcataaagcaggcttaaacgtgaaaaatatcttaatggatgatgatttagtccaaaataaaactgaatgacctaagaagctattctagtgttatattcaaattaaataaagctctgagtttgttcttgtgttttttacacaaagagctaaaataaatatgaccccccccaattttttaaataagtgtgatctcgtatagggaaatactcttcaattatctgaactattaataaacgaattctccctgcgtttcatagcgactgaggaagaaaggagtcctctgccacatccatgcaattgtgcttgttcctgcctctttccaacggctggttaggatgtgacccaaatggaaaagttggagaaaaactccatgaaatttatctaatagaccctgatgttgttggcctgcaatgtatggcactggctgccaggtggccagatgttgctctgaaatgggaactaattcgataaaaaagagaaagcactgcatcgacactggcccctccaccatcacccagcagaatctgagtttcctctgcctcctctggggtaaatgtttgccccagaacttctctgggagctggagagtgtctccaagatacaggactgaattaacttggcccctaattcaatcgcagaagacaggctatttcaaatcaggtttaaatttctagactgtgcccagctcagcacgagaagcttatggacctggcactattgtttctccacgacggggagtattaaatcgctaaaaaaaaaggggggaagcgaggataatgggaaggcacagagggcacagtgcccattatatattcaagggaacgaggccataactagggagccacacttcgtaggcagtttgcaatttttagaaagtctttgttgccccaattatatttctgcataccaataagaggtaatcaatctgataataagatagattatttgtagtcattttttaaataaatgttttttaatgagtactttagaccactcaggatgtttgtcctagttgtttggcatttgattgccataccttgggccttgcacaaggagaagaaaaagaaggaaagaaaaaaaaggaaaggaaaagtggggaggagagagggagggatggaggaaggaagacatgtcttatctgaagcaggtggttgaaaggtttaaaatccaatgaaagtattgtgttatccataacgctggtaaggaagactaagtctgtgctataaggattgcctttacttttaaaaatgatacatatttttaatgagttgtagtttttaaaagttagctgtagtttcttttctgcggtcgtttcccagagtcacagtccatgtcgattgattttaaatcaatgcattggctgtataaatggccattaactttaggaaattttttataaaaaagaaaccaaaactaaatcttggaataaagctttaacagctgacttagtcattacagttactccagtgctacatgctgagaagaaagattataaatatgaagcactataggttttcttcttttttgcagtctattgtagaagacaaaaatgacaccatcatacagttacctaaaagacttgacaggtattgatttaaagcacgatatatcaagcggtactgtaaaaaggatttcatggtcataaattttaatgtcttccaattttgcaccctctcagtaacttgtcaataacaactcttttgtataaaatatttgcctggttcccacatgccattaaagtctgctatacagttgttggaatatataagatgtgacaaaagagaacttcacatatgaacgttcacacatttctaaaacctaacatgtatcttaaaattagcctcattgcccaaatataggtactggaggatggagagctagcagtgatttcacagtattttaagtagtttatgttttgctcctcaaattatagtgcatgtaccaagaagttcccatgaaatctggctttttacgcattggtgtaaattatgtacataaattatgaaattcagggctaacaattaggaggaaatgactaccagaactgacatcctttattaacaatatcccgacaactattaaattacttaaatataatctcgatacctactaccgaaaaaagccctcttgtcatccctcatgttattcgttcccagaaattattcctcaggtaatttaaggaatctttacttatataagtgtttaacattttattagtatgctgacagaaaagaatgaaatagcaatgtgaggatgttttaattatgccattggaaagaaaagatattattatatttatccacttaaactcttttacatgaaacactaaaaatatgtttttacaagcatcattccttttttcattctaatagaataatgacaataggaattgacagcaaggatataaaacatcaaggatataatttctactgtctaaatgttaaaataactatttcaaaagcaaagcaaactgatataccaacaaatatattcagcagagtaaatgatcattaagtgtacattcatttttaaagagccaattatgttcataactttatcacgtaacaatataatctcatcattattataacattaaattatgttgcattttattaatgatctgattggattctacacttccctgattgttaaattgtttttttaatgactgcattatttcacaaaatcctgtggctcttatctttgtgtgatgttttcatttaaaatctttcaactataaaaagaatcataaatctttttggaaggtatttctacagagataagatttcttctgggatatgtagggtgctataaagagggaaatacccagtcttgattctataagccaaaagggaaaatctgggtatatttttggacagagaaactttaagtatttattttttaatttttaaatggagtaatctaaggctgcagtgttcaaatctgccttctattttaccatactgaataaaatattttcattcaaatccaattttctattgggggttagaattgacacataaactgttcatttaaaagaaaaacaattaaatatactattgtaaagctgtatttgatagtaatatagttgtaatgactgcctctgtaagctttatgaaaaccagcagaccatttctaagagaaatcatggaaagaggtataattctacaaagaaagcaaaagacaccttataaaatttgagagaattctcatttaatttttttctacttcaactcaaaataatccctctaatttgcagacattatcctttaaagtcccagccaaagcagttattcaacaagctgcctagtcagcccacctgtaactaaaaataagagattatctgccctaaggtggcatttctataggatcggaaacacaattacttccattgttgtagttgtgcttctgtggtattctggaaaagcctgtctgattgcaggttttgtttgttttgttttgtttactcaataaaaagttttaaattagttatttaacatacagtctatgaggccttcaggaacctcacgcgatagaaacattttgtttgaacatctgttcgttgtttcgtggttccgatgttattaatattcttgtaggtaagcaggtgattcaccctaaccaaattgccgtggtccaggagcagttttctccttcccctgaaaaaattaagtgggctgaagaactgattgctgcctttaaagaacatcaacaattaggaaaggtaaatgttttgttaatgccttgggtgagagcagtattgaaaatattgtcgggaagaatgaaacaaatatgttgtgtgaatggtttaagaaaactcatcgtatctggagaggggggaaagggagggaacacaacattcaccagtgagaaaattgcttgagatagatttgccctgcccatgttcctaaatacttcactaactggctctcaagtccctcattttattcttttcataaaatatattggcagccttagagaaaatagaagtctgtttagtttttctctacagacttctatgcagcattcatatgaaaataatcctagatcaaagtgagaacaagttgtaatgaaataaacacagtttgactaaatggttcttgtggaggaaagaaataaattgcaagttattttaatttggggggaaaaaagtacagaaatctcctccggtttagtcatttaagagtgggaggttgtatatgtgtttgtaccaatttctggacctgagatttggatggaatggaaagcaaattaacactggagtacggttgttcctaatttagtgcatcattgagcctcgcgtttcctgctctgtgggtttctgctatgtaaatattgcagtggtaatgcacaatctgtctccactttgtgccagtaacacttaaattaggtgtcgcctgaaggaagattttatgctagttgcagcattgtcagttaattatcttaaaggttatttgcaataataccgtttgcctctttttaagaggataggagggaaagttacatttataaatctatcctagaggtaatctctaaactcagcctgtgacttccagaaggagtaaagttttgatacctataatgcaaaattacttaggagaaagaatattgaaaatttattacagttctgaatattaaacattcccccctgcaaaaaaaaaaaaaaaagaaaaagaaaaactggtttttagtggtgaccctgaacctgtgacatccatgtgagacatgtccctcgcacttttcactggcagcaaggacacctgaaaatcccaggacttgccaaagtgggcaacaatattaaatgggtcattccctaaggatgtccacattcaacccatgcacacatgggcacactcacacaccagcaggctcatctttgtacaaactcacacttaatctccaaaggcagaatatattacgttggaaatacccaatttggacttacaccaatttcatgataaatagcatctttccatttcccatcaacagtggccatcagaaaagtaatgcatttcatagaaacaatattttaagttgaccttgtgtttagtgtccatttttgtgtcttaaccccagatcaagattcccatgagtaaatctattcacctagaacgaagagccacggactctcattcacatgtccatccatccccttcccttgcatacctgcccacgcatacccacaccgaatgctctatacctctgctacaagccttgtgccagctgaggacaggcatgtcataaacacctcctggtgaaataggaaactgaggcagcatgtggaccattgaaacgagagagcagagttccagtctgggccagcactgtgtctatgacccatcccagctgggtttcacattgggtagcatcaaaggagggcagttggcattgtaagcagataggggtgtgggagagtttaccctgaatttcagtagccaacaaacagaagtcaaaccagaaacacttgctttgctcagcatttaagtttttgaatgaggaaaatggcccttttccattgtatcttgaaaagcgttgttccctgggaaaacgctcccaaagttttcacaccttttgatgatggcaacttaaatgttcaattctggactttttttttttttaaataagaaatgccctctcgttggggcataagctctcacaacagtgtggcaggatggcttttcttaacacagaaccatagaaattagagcagaggggagactaactattaggtaatttcttccctgccccatttgtggaggtttgtttcctatagcaaattctcctggtgttttgtccagcaaggttgaaatgattcaagtaatggggcttccagtagggacatatggttattttatccagttagcatgtttctttcactttgcctataaactggccggtcacagaaattggatctgcaggtaggtgactctggatcttgaggggatcttggggtttaaataatgtgggttctgtttgtaaagattttgtgtaaataggttgcacaattatataaagtattgcttccaacaaacatctagtctgttttatgtcaaatgtgaatcactgatgaacacgtgaaccctcagatattttgtccaaagcacagatgactctctcaaagataggaaactgatggtttgtgtcctagtgtgacagtcacaaatttccaaaagacctttttcctccctctgatgaaaatttcattcaagtaatgcttttaagtagaaatgacccaagaaggaaaaattatgtatctttgcttttctgcacttcttcctgctctcatcttaaattatatcctgcccaaacataaaggtatagctgaagttcacagttagccaaacataaaggtatagctgaagttcacagttagtgctgagccatttgtgttttctatagtaataatcattactattattcaaacataaaagctctaccctttcttcctgtcctgtccaaatggcaaaattcatgggactacttagaccatgagcagataaattattggagttcagactttggtattacagaattttggggatgtttattttaattaaaagtcctaaggaaataaagtttggtgtccttggtataatgttggttgacaatcactttacattaaaacaaataacaatcagctcatatcatctgtccctgtttggcaggcagcgattcttgtggctgctttgtttcaggaaactgaaagatattttcaggctaaaaaattttgcttggcaccgtagtccagtaatcagagttagggctagagactgacactggggactctaggttatcttatcttattaaaatctgttggaaaaagtttaaagattccaaataatctctgctcctatgttaattcccagaaactaaaatgtttttaatttagctgacatcagctgtaaggtttccatccacaatattaatcaaactgactttcttccatccttccagaaaaatgttttttgagatacaacgtgcataccattaattattttagtttcaaattatttggtaaaatgctttaggcaggataaatcatttccacatgatttgttttaaatttataaaggattttcttaaaagttaattccatttttatgtctttttttataataatggtgattccattaatatttgaaaattcttcattcagaactgaatttaatatgcttattaaagtaataggatttcaacagttcttttttatcaataaagaattttatatactgtaaaaattggatacttgaaaacatctcaagcaaataatcatctaatattgatatcaatagaaataattttatataaacacatatagcatacatgtttatacaacatataaacattcaagtatgtatgataacgtgtatttcctcaaatctatattatgagcttagtgctaaagtttttatctttccatattcatcactcttaggcaaaaatgacagctaaaggaaacagtcagttgcttttttaaaacagtcactaatcacaggaaatgttaatataggaatttactatttctttccaaatggagactctaacagaagaatgcgaaggaatagcacaatatattacgtgtgtcaaaattttaaagatactctgctagaatattcatattttgcagtatctggctacaaatatggctttgcttcattttcagttttccagacattctctttgattcatatcatggctgtacgtgctttgtttggttttggaaggattttgtttggctttttcaatatttctccttcgttatagcttcacaagttggctaaagactgaggaaggggaagtattcatctttaaattctaggttcaattaacaattacaaatgtcagaaacaagatcactacctggcctaacaactgtaagcatcacgcaaccaacattctcatttcactcaggagagaaaaacagtgcaagctgataagttcacattagtaagcacatcttctgctggaatataaactggaaacatctcttaataaagaaagaaaaaggaaagtaagagtttttttccttatgtaagtctcttcatctagaaactttacaaacagtaatacatccctcctcccaaaatattgaaagcccatcattttcataggtgtctgattgctgctcgcacacctttcatttctgtttccaaatgcaaggctttacaaaagaaatattgcttggtccagatggccttctagaagcctccctgagagaactcaggagaagtttctctagccaaaaatattgtttccgcttattcaagtgccagaaatcccactgccactctttcacgcagatcaaataaaccatctaaagacgtggttgttgtctttgtcaactgaaagggttgattccactattagacaacagtgtatcctcccacacccatccagcccacgacccacagccttccctctggatttatgagcaggaacacgaaaatcagagctgagaggtttgtagtgaaaatgaaagataaagggacataactctgttttagagattcttagtaattgcacttttctctttatttccctgctcatttaacattttcagaaagatcggccataattttgatttttaaaagtccagttcttagaaaatctgagtctgccaatgatgactttaagattggatggattaacacaaaattgcgaaattttaaacatttaaagcaaagtaatgaattgctacaaagtattgaaatcatatcatattctatttcacttttttttttttttttttttttagtggcaaatggctggtttggtattagaagataagagtgtttttaataggccgggtgcagtggttcacacctgtaatcccagcactttgagaggccgaggtgggcagatcacaaggtcaggagtttgagaccagccttgccaacatagtaaaaccccgtctctaccaaaaatacaaaaaatcagctgggtgtggtagcgggtgactgtaatcccagctacttgagaggctgaggcaggagaatcacttgaacctgggaggcaaaggttgcagtgagccaagatcacaccactgcaatccagcctgggtgacagaacaagactccgtctcaaaaaaaaaaaaaaaaaaaaagagtgtttttaatgtagattaaatcggacaatgttttaaattgtttgctttgtccttaatttataacacactcttaaggatattttaatcaaaatattctttatccaggttcatatttttccgggttttatttgctcaattttgattttaaatatgtcattattttagctggatgaaatctcagaaatcttttagtcagatgccttcagtttatgacttaatgcacagaaacccagcaaggcttcagaagctgcccagtatcactcacagccaaggtggagagagggctgcgagcagaattcagggcttagtttgtaagtaaagatatggaatatcataaatgtgtcttcagttgaatattacagtgaatacccacactcatgaccaaaacgagatagagccttaaatgcactcagtcacaatcaaaatctggatttgggtagttccaatgtatgtcttttcttgaggataagcagaaaccaatgaggaaagagagaaaccagggtctccacgtgccgttccccacacgcctccctgctcagtgctgccctgccctcatcccccagccctgccccaggaagccttctaggctctgttcactgcaaaccccacttcacatcattagttatcagtcgttcagtctcccaacatagattggaaactcccagagcaagcctggggagcctttggcagagaggccatatttactccaaagcccagtgtcatctcaaggacatcaaaggacaggtccccagagtcacactctcagttacacctgtgaccacacacaccccatggtgttcagtgcctatggcagcaagatcgaagtgatggccaggagaggatcattttgttccttggacacctttccctctctttcctcttcctgtatttctccctctaaggatggatgggtctgtgtgtgtatctttctgttccaccctcattttccttgccctgaattctccatttcctctttttctttacatctttttctttctcactacatcatctccacaccccaggccatccctcaccttctttcctgtagctaattacattagagactttcagagcattcttttatttatttattttttggttgtattaattaaagaattttgtaattctttttttttttttttttttttttaagacagtgtcttgctctgccagccaggctggagtgcaatggcgtgatctcggctccctgcaacctccgcctcccgggttcaagtgattctcctgcctcagcctcctgagtagctaggattacaggcgcacaacatgcctggctaatttttgtatttttagtagagacggtgtttcaccattttggtcaggctggtctcaaactcctgacctcatgatctgcccacctccgcctcccaaagtgctgggattacaggcgtaagccaccgcgcccagcccagaattttgtagttctttttatactgaattttattaaaaatacaaagcaaccatttctataattgtcttttttttcccccactttaggtcagtgggcctcaaaaaaaaagtgaggcaatttcttaccactaccttagggaataaagaattctctctaccgtagcacgcacctccctgcagcatcttgggcagaaataggtacacgaaacacatttagtaaacattatttagctaactggtttccaaattcctgacaatgctaaaaaaaaatttattagatgtacttttaacagtatatatgacatacttctgctgccttctagaaaaattgaaagaagatgtttccatcaattatttcatcagttgttattcatcaattgtgctttgaaaaaatgtaccagtattttagtaaatctttcagtctcttctagttaatgttaactcattaaatctgttttccaaagaaagaataagcctgcattattggtcttagctacaaactgctataaatggcattcattgtttgcttttctcataggcaataggagcttaaatttgatgtcaaacatttttaaataaagacatttaaacatttggcatgttacacatttgtcttggttttaaaaataatttttaaaaatctttaaagaagatttctggtttcaaaaagaaatctgagatggaggtgatagtagcggaactctacataattactaaaaaatcaatgacttatgcacgtacaatgggtggattttatggtatgcaaatcgtacctcaataaagccactttaaaaattgagaaaattaagcacaaaacctaatttgatggcaaatgtgttaactcccttagattttgatacacttgtaaatccaattgtcttcacctcaatacatagctttctacatagcatacttggctttatttttccagatttccttgtgaaaagatatcgaaaacaaagacttgcctactcttgcctgattattctgcctgaatatttttaaagagaaatcttgccatctacatgtttagaccccgaggaaagttttaaaaatagaaggctaccttggtctctcggatcagcgtttaaagtaagcatggctctggtccgtggagacccagacctgggcaagtagatgattcgggatggtcacatatgcagataactggcacacacatgcacctcagctctcctccctgttgttcagccgcctcgacctttcctgccctgctcctgccaaatccatcttccaagccttctactgcttctccttccccattgcacccccgacttcctggaactcttggtaaagtcctgaattagtcttgccaagaacaacacacaaatctttctattttctagccccatctttccatttatttagctaaagctaaataatttcatcctgcctttgtaaaaagcagaatgttaacgctgtctattcattttacatccactcaatttccacattccaagaaatgtcctcccttttgaacaaatgtgtctagctatcatctttgctacacctcttccttttctggtccatcatctgctgaaagaacggtgtcctgcgtttcagtacctcctcctccgtgtaagccaagctctggacttcagatcatctgcatttgattagcgtctgtcctctgctgatattctaagttttttaatttttctaaatttatttgttttcctcctgaggcgctgccaaatatatagcatccctgagtctagtttcttaaggagacaactaaatctatgatttataagagtttagaggggacaggaagcttcaggcatgagcctgtttctattcattgtattttcaaaaacactgatgtttctcaaactcttgcaggtcttaaaactactctgaaatcataaaacccacttagaattcaaacagtctgcttctcactgggccattctgtgataagtggaattaaataatctctggccagcaataacagtagcaataccagtagcaatggtggtagcagtaaccatgtgtgccgtggtcatggggctggtaataataaccagaggagagatcatcatactcctaacagtagtggtggccatcatgacagtggtgtggccacagtagtgacagtgctggtagcataactgcttccatttatatatatataaaacatattccatatatgtgtgtatgtatatatatatatatatatttttttttttttttttgagacagagtcttgttctgttgcccaggctcgagtacaatggcgggatcttggctcactgcaacctctgcctcctaggttcaagcgattctcatgcttcagcctcccgagtagctgggattacaggcgcatgccactatgcccggctcattgtatttttggtagagacggggtttcaccatgttggccaggctggtctcgaactcctgacctcaagtgatctgcccgcttcggcctcccaaagtgttgggattacaggcatgagccactgcacctggcccttgcatatattactttatgtaatcctcacagcagccctacaggggcgatattatccccattttccagatgaagaaattaagactgggaaaggtagctttattcattgtggatcacacagctaggaaaaggcattcctggattcaaagtcaggtgtaatggagcccaaagtccacatccctaacctctgcatgaagctgcttctaagggaaacccccagaaaagccagatcctttctctccagggagcttcattccccttcattgcagccacaggctactgagagccacagcaggctgtgcccatcctggaaagtgtcctgtttctgtgtggagaagatgatcccccatgcctgctcagaccatcactgacctggcaggtggagctgccccaggaacacaagaggcctcccttccgtgcccctcatggccctggcctctgagtgacagccagagagctacaggggaagggacgggagggataaagaggagcttcttcaggcttctgcacctttcagagcttggaaaatgaatccactaactgcccagggtgcagaatcctcccaacctcctgcacgacccccaaactcagcaccctctctgaacctgggctttccggggccttccccagctgctcagcatgctgctcccgtctggcttttcactgtgcttcccagtcaggtgcaacatgaatgccaccccatcccaccccaaacccgatattcccactgttacattcttatgaattatttaaagggcttctccatcaaaggccatggagtgtcttccgtctgaattccatgataggtaaccatagattagcacaatgtgaattggtgtctgtgttgaatgacttcggttgaactttcagaaatttcatgtagagatacattagcatccgtaaattatctggcaataggaacgaatggctgctgaatttcaattcaaaatattattaaaataccgatgaaattatcactacaatttaaagtgtaaaaagatgaaaaacacgttctatactttctaagtctccagtcatattcttttactatcttcctgacagttgtttatttatttaattattgagacagggtctcactctgttgctggagtgcagtggcatgatcatggctcacttcagcctcgacctcctgggctcaagtgatccttccacctcagcctcccgagtagctgggaccacaggtgcgtgtcaccacatccagttaatttttttttttttttttggaaaagacagagtctcactatgttgcccaagctggtctcgaactcctgggcttaggcgatcctcccgtcttggtctcccaaagtgattacaagcgttgagccactgtgcccagccttcattacaatttttaaagatgtttatccataaaacaaagggttactgatattcagatgttatacaaggaccaaatatcactgccttcaatcctcctaacaactgctttaggtgtttttaagacttaaaatgtcactcatatattgtattattgaattctagtatttctggtattgtaataaattatagtaagaactttcaaatggaagcccaggatgaaaaatgttatagtttacttttgcccaaattctcttgttaaaattgcagtttcacgtatttgcttatctgcacattatctgtatgtatttttagcctcatcttatgtaataatatttctgaaatagtttagatatgctatttttataaattacattaaatataatttaaaatacatagtatatacaaaataaatatgtagctgtattagaactttataattatcccaaataccagttatcagccatactttgggttacaatgattaataagaagaatttgagatttggggtaaaaagccttagattctagtctcgtcctcttaagttcctttataagattaactagtactgaaccccattgtttgcacctgtaaaactaaataatcatgccttctgtactataggtgagaaaatgtctttgaaaatgttttgggccaggcgcggtggctcacagctataatctcagcactttgggaggccgcagcaggtgaatcacttgagatcaggagatcaagaccaatctggacaacagggcaaaaccccatctctactaaaaatacaaaaagttagccaggcttggtggggcatgcctgtagtcccagctagtcagctagtggggaggctgaggtgggaggaccacctgagcccgggaagtcaaggctacgatgagctgtgatcgtgccattgcactccagcctgggagacgggagtgagaccctgtctcaaaaaaaaaaagaatattttgtaatagtataaagtactatcacatgaaacctcttttttgggtaatgggtcttcctaatagaattaccctcctccaattttcagtttggaaactaatattccagggcttactgagggtatagttaactagagtagaggttatagttgccaagacaatcttcctatttcctcctcaaggaaactgacatcctttcccctagatctacccttcccctggcgcccagaaagctgtgccagacaatccatccatgctgtcccactcggaagtagggctgggccgggccaggccaggccagcccagcccagctcttagcttccccatcgttggatcctcggaccacctctggacagaggaaaaacacccagagtgaagaaaaggaaacaggtggttcaacttcctctgcttagggtccaggaaggagcaaacgtgggcccatcagtgcatgtagcaagaacaggaaccccaccgggtttcagtccagcttcgtctaatagagactgtctttatgtgctttgtcataagaaaagtcaagcagctaataaatagcagaaccgaccgggcgcagtggcttacccctgtaatcccagcactttgggaggccgaggcgggtggatcatgaggtcaggagttgaagaccagcctggccaacatggtgaaaccccatctctactaaaaatacaaaaattagctgggtgtggtggcgagcgcctgaaatcccagctactcaggaggctgaggcaggagaatcgtttgaaccagggaggcagaggttccaatgagccgagatcatgccattgcactccagcctgggcaacagggctagactccatctcaaaaaaaaaaaaaaaatagcagaaccaatattttaaaatgtcatctctcttccagattgctttaatttaggctggagtaggctgcgtgtcctcaggctctaggagacagcttttgagccatagacagagccacagaaagatccagtgtctcctaccacaccccttagttttgtgtgtctgttatgtcactggtgaccagagacacaaggctcctgcagagcaaagaaaaccgactccatgcacacttctctgtgtccccttccagtccccacgcccctctcctgtctcctggcatccctgaccttctaaagctgacttttaaatacctgttccttgaagcccttccctggccaaaccagcaccattgtgatagctccttctctctgcagctccttggccctgaagcaccacaaacatcataaactcacttgccctttaactgttaagtcatttgcatgagttaacttgagcccaagccaacatgaaaattctttttgtgaaaaggtctcactctgtcacccaggctggagtgcagtggtgtgatcacagctcactgcagccttgaccaggctcaagcgatcttccccactcagcccaagagtgctgggattacactaccacactggccccgacattaccagttttgaagtcagccatggtgtcctaccagaggctcagcaagtgttggccaactgaccagtgaatattaccagatcaggggcacagagagacatgtgcagataaaggagaggaaaagggtgagctcagagctggaaagctttgtggagacctggggtgattctgtcttctcctatcactgtcccctcgatcacccagctcacgccccagagagagccatcatgtgccctggtctgtcttccttccctcctcctgaccctttcccctgcttagctgctcctcacccttcacatgtcagtttaaacatcacgtcccacaggatgccccacctgatcaggttaggtcccctatcagttactcttcaactcccctgtgccttgcttttggagcaaacgttctagttcttaagtaatagtcatttctatcactgtctatttaatgtccttcccgccattagactggaagccctgtgaggtcagggaccacatctgccttgttgcctgctgtcgtaagtccctgggcctgtggcacgccaggtatgcagtaggctctgcatccatgtcaatgcagggagctgataggcacaggtgtgggccagggcatcctgcagagtttgatggggtgggaggcagagccccatatccctgagaccagctgggatgaagcctcactgcacattccaggtgacttaaagattcagcagggatgtgtgacagcaaagctttgcccagacaactacagtcccttccctaaggtcccaaattaaagaaaaagagtgacccaaatcaccaactaccgaacttgtgtccttctattcaggtaggtcggtattgctgctcttggctttgcattcagccttttccatcatcaccaggtcagcggtcacagagcatctcccgtgtacctggcaggtactgggtgctgggtgccaggtcctgggagtcaaaggtacgtgaggcctggcgcctccccacaggggcctcacagtgttgtgaaagacagcaatgtaaacaaatactctcactagatgggaacacaggctatacagagagctgtacagggaaagggtggagagggatttgctctaccaaggaggcctcaaaacacttcacagaggtgacaccttgacatctggaagcatcaggaggagtttgccagacagggaaagggccttcagagagagaacagggcatgcggcagagctgcagcgtggtgtgtgttggggtacaggcctcaggggactggcaggagatgaggctgaggggggagggtcccatcatgggcaggcttgggtctccactgaagatattgcacttaattctgcaagtccaaagaaaaccatggcagggttaaagcaagtggatgattccatcagatctgttttagaaagataacagcacgctcccaactagaaaagtgccactccctataaacatcctggcaccatgtccctgagagctccaggagccagctttggagccgggaagcctcactgagctgagggtgcctggcacccaaacggacatccttaaaatgaatgtcacaacaaaactgagagggaaccaagggcacacgagggcctttctaaggactctccaagtgggagaagttgcaaaataggaaagaagaatgaaacagtgcccatgagagtgtctccgggagcatcatcttccgcctttcctgaggagtttcagggcgctgttgacctcgtaggtaaggaggagccgtatcccaggaggccacagctgggctgagagatttagcaagtggaaggcacagccaggatctcgaggagaaatttgatcacggccaacactggctggaagtttaggaattccctgggaactgctgtgaggccagtcattcattcattgagcagaaagacttagcaccatatgggaaaagggtgataccccaaaaaaggactctagccgctgtattcaaatattagcgttaattctcacagagaactccctctcaggaagccacagcaacaccgtcatcagaatgtgccagaaggaaccccttcagtatccacagaagttaatttggaaacatagtgaatagggaaagacttagatcaatttgtggtttctagaaaattactcttttaggactatggagaaaaaagtcaagtactaagtaccagaaatgcaaaatatatgacaatttcccatagatgtgattactattgtcatcacgccatcatcatcaccttcaccatcaaattgtaagtcagattatgtcagtgcttatctgatccacgggcaatggccgaggtgtcagaaaaactacagttcgatggtgactgtttccttcctacgcggaagacacgtgtgctatggtgatactggccttcacctccaggagtctgaaatcatagacatatgtatagtaagatgtgcaaagcaattgaccagtgatttattacaacaaataacgccataggtaactgtcaaataaaagcccattgcgtccggagttccacggcaacgcgtggagatgcctggcattgctctaggtacccaatgtcgtatctgtgtgagcagtgcagtctcgcaaagatggccctgattgggaagaagtgcagccatggcaggccctcagatcgtccctgtgctcaccaccctggccttttctccgattcttgttgcatcaggtagcacctgcttcttccttccctctcccctccagcaaatggtaagctcccagagggcagggccaagtctcatcctctcactgtcccaagtgactcaccagggcctggcacaagggagctgctcggtccatacttgatggatgaatggataagtggtgactaacctaaggaaattctgccatttggcatcttggggatgccttacaagagaaaggcatcatttacagaaggctgcaagaggactcttcagtttatagacctgcatatccaagccagcctaaccatttctacctgggggagctaaaacacggaagttctcaacgtgaatgtgcattagaatcaccagaggagtcctagtcaacctctaggttttctgcacaaaccacgtggcactgggcccaggaatctgcattttaacaagtcccccccgcccattgttctgattcagggggtcacagaacacactcagagaacccttttcaatcaccaggcccctaagagcacaggcttggcattagatagagtcagctttatccctgttctattatatctttactaactgcagggctaagttgcacatggttcttaagctccttctgcctcagtttcctcagttattaaaaggggatgagtacaaactcagagacagaaaggagaatggtgctgagcagtggctcatgccttgtaatccgagcactctgggaggccgaggcaggaggatcacttgagcctaggagactgagaccagcttgggcaacatagggaggcctcgtctctacataaaaaattagctgggcatggtggtgcacacctatggtcccagccacatgggaggctgaggcaggaggatggcctgagcctgggaggtcgaggctgcagtaagccgtgatgacgccactgcactccagcctgggtgacagagtgaaacccaaggattctacttttgggatccttgtcaaaagtagaatggtggttgttgagggcagggggacatggaaatggagaattgtcttatagatacagagtttcagggatttggggttttttttttttttttaggatggagtcttgctctgttacctaggctggagtacagcggcatgatctcagctcactgcaacctctgcttcccaagttcaagcaattctcgtgcctcaacctcccgtgtagctgggattacaggcacccacgaccatgcccagctaatttttgtatttttagtagagacagggtttcaccatgttggccagtctggtctcgaactcctgacctcaggtgatccatccgccttggcctccaaagtgctgggattacaggcgtaagccaccatgcacaggctgcagagtttcagttttgcaagaaggaaaagctctggagatctgtagcacaatgtacatagagttaacactactgaactgcacacttaaaaatgtctaagatggtgaattttatgttttatgtttttgccacaactaaaaagaaaaagttttactggggttggataatggtatctacttcaaagtgttgttatgagcattacatgaaataatgtatgtaaagtgccaggcaacaggccccagactaggaactgctcaaaaaattatagctattattattacagtagcatgggtgttaaaaaatttaaccatgaggccatgcgcagtggctcacacctgtaatcccagcactttgggaggccgaggtgggcagatcagctgaggccaggagttcgagaccagcctggacaacatggtgaaacccagtctctactaaaaatacaaaaaaaattagccaaacgtggtggcacgcacctgtagtcccagctagttgggaggctgaggcaggagaatcgaacccgggaggcggaggttgcagtgagccgaggtaacaccactgcactccagcctgagcaacagagcgagactcagtctcaaaaaatatataataaatataaaatataatcattaaggaagatttcaaaccctcctcaaaaatccaagtagctttttgatgaactgcatttttctaaatcctgaccaatagactatttttcatctcacctatagacccacatgttaaaaaaataccacctaaattataggtggctatgtgagagcctggggatattcacgctaggcagtctcattcataacactaccatcctccatttgcagtgatgcaggaaacaagaaaaatgctacatttcgttttgcaccttaagcttcattaaagaaaatcaagcaaaacctgcgaccatagaagaaataatctcccagtcttgaaaaactacatgaagtgttttttatctttgatgtgcacatggaacccaaagcaggttcgggaacatggcacagactcacagccaccgtttggattctctgcgcaccgttttgatttcctgtgcatctatgctaatttcgtctccccagcctattgtttaaaccctagcaggacagatgtgctgttttacagggccataacccacttggtgggtggataaccaagaggcctttggtcttcatcatttactccaataagaaaactagacgattgccttgtaaaacagcatgtgacccaggcccggatttccacgtaacgccaacctacaggaccacctcggaacttccaaccaaattaggaaaattcctcctggtcacagaggtgaccaaaattagctcgaggctgaatgaaattatggaaaggacaatctaggggtaaaaacagtaaaaacaagagggctgggaagtgacttacagtacaggaatttaggtttaggccacacaggtgttcatgtgagtaagagtcatcatttctaaggctgaaaaggttggccactgctggtaaaaattctaatcctagtaggcttagaatctctctcaatcaaaagataaatcccaaaagtcattgctaaggattccccccatttttctttacctccatcctatgtataaccgtaagttactacctctcagccctcatcatgagagcccagcactcctgtcccggcagccctgagtgacatcagcattgactgttgggaattggtacttgtgaaatccagaaatgggctacaatagatgcaaatggaccatcatcaatgtgcattaggattgccccagccacccccagatctcgaaggacccctgcaacccagtcacaccagcatccttgccaacaggtcgaagcagggtggattaggatgaagggatatcatcgtaagcagcaaaaggaagtgatgaaaagaacacaaataaccagacattaactttgggttctgagcatgctgctttctgtccgtttaatctatcttttgctgatgcacttaaagaagctaccttgtcttcttaatgtggggatctctgatgaaggcttgaagctctgagacccaagcatcagccccagctctggctttccctagtcacatgaccttggaagatcacttctttttttttccttcttttactactctgagcctcagtttcctcatctaaaacagggcttaggttacttgacacagtctatataagtatggtagaagttttttaaaaaatgagtctgtaaaatgggactattccaagagatttcagagatgccttcccatcttaacattcaacagatctatgattcctttgttacagctcatgtccctggtatttctttcttttttgagatggagtcccgctctgtcactcatgctggagtgcagtggtgtgaccttggctcactgcaacctccacctcctgggttcaagcaattcttctgcctcagcctcccgagtagctgggagtacaggcgtgcaccactatgcccagctaatttttttgtatttttattagagacagggtttcaccgtgttggccaggctggtcttgaactcctgacttcaggtgatccgcccgccccggcctcccaaagtgctgggattacaggtgtgagccactgcgcctggccgtccctggtcactctaatcgtcttctgtatgggtttaccaacagactcatctctttgtaccctgtacaatcctaccttgcattttctcataaccttatcatgttacctctcaattatgttacagcaaggaggtaagattttgccattagcctgatggtacaattttttaaaacaataatcagttgccagaatatattcttgcttttaaagttctacataatatttcaaaaatatatagggaagtatttagattttccttccacagctgttttctgcttgatttcaagagttaactgaacagtttgctgtcttgtgtccaatgtgtttctcctctccattaaaatgctgaagatttttatttttttcccctctttagggggaaaaaagaagtgtttcctctgtaatttactttggctttctcaaaagttgggcgggaaagtcagtataattcaggtggaatctaaaatgttcttgttgcacaagtgtgcacagaaaggaaacctataatttcgagtattctttcaggaagtttgtattctctgttttccagggggcctttactttccaagggagtatgatcgacatgccattactgaagcaggcccagaacactgttacgcttgccacctccatcaaggaaaaatgatctgttaaatgaagctgtcatcaggtgggctgaacatatacagtggggttcttaaagacaaaccacaatactcaaagcaacttgttaggatgccagattgggacctgactccatttacagttcatgttaatcacaattttgttgttgttgtctcactggccagttattcccctaaaaaaatgaacgcttttccctttggatccaagcttatgattttatcatttttagtgtattacgaatatgggcttatgatttcacagggaggtaagatcctggggaaagatgggctgtgaggcgaaggtaggtctttaatgaaatggatctttcccaaatagacatattccctccacccttctcatgttagtaaatgtttcctgcttgttcatttatacagctgacaccacaaataattttaagaaaagccaggcctttaaaacatagtagcaacattaaggggtcatctctatttcactagtaatctgataaaacaacagagatggcatcaaaaaagaatactaagtattatattggcttaaaaagacactttctgaaaataaactttcgaaactggttactattaacctccacccctaaaacgaaacatccatctccttgaaccgctagacgatgaacacgaaagctgtcatcctgggtgaatgctgtgagtcaaccattaccggcaattaaaaaataaatgtgcagaaacacaagaccatccattctccccctttattttcccgtttaactgtttgccattgaggctatttccccctggaaatgtatggctgggacaggactccctcagtcataaacttgtagcgtctcagaagacacaatgcacccgagctggtgcatgtggcccctgcgagatttgcatcacattagagatgcggctgcaggtcagatgggtggtgtggttaacgggcttagtaaagctgttttgaagaggttaacccagcttgtagtaagggtaaataaacataacaaccagccattgttccctattcagcatgtactcttatattgaaggctaaagggtattgaagctgcagagggatcaacttgtgcttgccagaggacgccaatgaagtttgaaacaccaacaatcagagattttgtttctgttcctcattaaatcatgagcttttgtgccgagactctggacgactgttccttaagaaattaacagaatgggaagttttaaactctacaccaaccttttcatgacctacacagcagcaacgctgctactcttagacaaacaccgcggggaaggctgttctgtttatttaaatttgtaaatagaaaacagttgttttttactttcatttttcacctcctcctacgcccttttggattatttcctctgcggcccctagcatgagccccaaccaggcctccccttttccccacttctctcaattcccacaggaagcccgagaggtgaggagctgaggttagacaccaggagaggcaccatcacacaaaagcgcggccgcagagtcccaccgccaccaggcgacccccacccagagagggacagacatgcggggagccagcaccgggcaagatggctctggggatcctcattctgtgaagacaccaactcatttctcaaacacaggatccaggagacagatagctcctaaatggagatggcacatgctccgtggggtccctcatagaggagtgccaccctccacactggccacgctgggctgccccagagcggccagaaaggaaggtgggagctagccccatcctcactcagaggccggaaggaggaagatggcatctcgccaacttcagagccgaatggcctctagccacactgcttccagaccccagacggggcagcagcagcagttcccagaggagcacccattgttgcagctaggacccaccaaggatgggactcctggagtcaggtgcacaccaggtaacccaggaccacgctgtgcacccccagtctgcccctctgctcagaacacagagggatgggaggatggcttggcagtgggaaggcaaaagaaggcctctctcactctgcccctgccatacgcacccgctgagggtgttagaagcagtggaggcagagctggccctaagcaaaagaagaaaataaacctcaccttgtccttcctatgggcagccctcaccccaatctaactaaccttcccatcctccagcctaatccaaagaagcccttggcttgaggggatgaagggcttgcgttctagtctccaccccagccccacaggcagccagccagccagccccacacagaggggcctcctcaaggcctcactgggagcctcctgtccccagccaaggagccctacagacctggggaaaagcaggcccctccgcaaggcccctgggtggtgcggaggccggaccggctaggcctcccgctgctggccactcccaggccacgggttcctaggtcccaaccacattggactgctcgccacgccactgccctcatcccaaactgctttgttcaaacaaaaccaccttgtttcagtctccccaaatgtccagttcattatcttcctcataacccatggtccctattagggtaggatcatgagactaagacctatgagagccacaaatctggaccaaagtcccattccctgaacagagacccaaacgacgagggtcccagaagagagttcagtcctgatcagaaacccatggtgccttagtccttgaagaacaaaactctaggaagaagatgctggaaggcaaagggtattccccctctttccccacccgcgtctctgtggtgccatgggtgggcccaggtaccctgggaaaggtgggagagcagtcaagggtgggtgtgtgatctccactgggctcactgggcacccccgacacggggaagtgagagctgcccgactcctgagccaggcgtgggtgacaggaagaggaccttgcagctaatctgattcattagaaaccatacctgtttatgttttgtgtagctcatcacaagccgcttagccatatcacccccgttattaattcttggggtctaaattatgggtaacactattaaaacattatcagaactaatgagaaacaattacttagaaaatgagccgggacaagactgagttgggaacatcagtggtgatcactgtagattagtttaataaatcatcaggtgcaaggcaagactgactgtatgtatgcaaagccccgtcacgggaaaatgaaattgagattttttttttttgcataattttttcattaatctcaataggacccgtgtggtgtagattgctttattcccctaataccttgcctgaggcgggggggggggggggtgcccaataatgtcttcattgttttactgaggtcttaatgacaatctgtgacaacctcattttaatgtatagaggattatatcaatacagtcatgttttattgaaatggtgaagggaactccagtcagagtcaggcagtgtctgtgagcacaagttaggaagtttctcggcatccgggagcgttcccgtctgatgtcccagtgttagtcctcccggccgccctcccctcctctcctccagggacggctgggaaaacagtcctgcgggatgaagacttcaccgcctccgatttgaatttgaaagtaactccttccgtggcatatttcgctgggcagatagaacaaaccatgtcgttttcccccgtctctaaaatagacatattattatcattcacacttttgcacccggtcgttttgcgggagttcgggaaactgactttcttcattggggacattgtaattttctgatgatgccacgaggagaaaaaaaatacgggtttgttttaattggaaggaccttccgcttttatgatttcggtttaccttggaaaactgaatcttctgtgttttatttctttcctctagtactagaaaagcaatgaattaattgcacaaaacaggttctgagacggcccgcaggccccgagctcgtggacgcggccgagggtcgggtgtgacccgcggagccgctgccaggcttcccagctcgtcttcgcggggaggcgggaggcaggaccagaccccagcatttcagcgtgaaagtcttcgcctttctttccgcgctgtctttcccgcgggcggagcggcgtacctgagcgcggtccccacggaggatcagtgactttcccagaccccgcgggcgagcccgcgcttgggacccggcagctctgcgcgggctggttttggagggggtggtgttcgtttgtttaaattccagttgttatttggcagcatatcgccttccgagtcagtaagaattgcccacgacgtaaagagcgacttgcaggaaggggccgaagccgtcgttagcgcccgggcggcggcggccactcgaaccccgtttccgccaagcgcgctgcaacctgcggggcgagttcgttttgttttgccaaaatcatttggggacttctttgtcattcatgcccttccttttaaatgatttttatttttttccactgtaagtgaccggctgggtttgacttttgcttcttccgacggaagggcaccgcgagccggggtgggcggccccgcgggcaggaggagcgcggggtacacgcggtggccgcagacgccgagccctgcggagccccgaggcctcgtcgcccgcgcccccggtgcgcgcggagccggggccgaggccgggccaggaggagtgtggcggcccaggaggcctggactgtgggccctgctcgcccgcccgccgcgggccgcccggagcccgcgcgcctgtcgcgcagcccggctgtaatggtggcagatcaaaggcggccccgtgtccccgcggagcccgggacaatcccgcgcctttgtgcgctgttgctaggagcccgagaaactaagagaaagtgtcaggagcatgttaatcagactcgttacactgtaacaataacgtctctctcgggtctcccaggccccagtacccccgcgcaccctgcgcgcaggccggacacctgcgcagggcccttgcgcccgccctggggtcccgccggccctggggtccctgcagccccgaatccgcacccgagccacgcggaacgactagccccgaggggccccgcaggctcccggtgcagctccctggtcgtggtctccttgaccgaagccccggcctcacaccgcctggccgcgagcccgagggacgcagggacgatcccggtcccctgcttttcagtcctccagtcgaatcgcccactttgttcaatcacagtattcgaatcaagaggaaaatgaacattccctttatggtagctttttggttatgagttttggcaaaactgttaaatcaactttgccgatttcccttgggaatccctggaggccactctaagtggtaatcccaagtttaagaaggaaatggggaaattttgctgagagtaaagatgtcgccgaactttttgaagggatttgcttcattcattcatttagtcattcaacagacacctgttgaacccgactgggtgccagaggggccagtcacaggacttattccagatgaacttttcttttgaaattagaatgcccttgtggaagccaaaggaggagcagaggcctaaaataatgtcaagtgtcaaagcaaaaagaagtgccattggctactacagtgtgtgatgataacaagagaggtgcgaattaggaattaaaaacgtttgaaaaactacaggccatatgctttgaaaccagccactttttccatctttcatctccctctcccctccggttttggtgggcaggagctatgccaggctgcagtcctcaacccgtcagaggcctgcctgaggtctgaggagtgaggccaggccttctgtttgtacacagcctttcaaacgtgcagagagacacactccatcctggccccattccccctttgctcatacgcagggaactggaaacctgtcctcaagattagggctgaatttggccaagttaaggtgcttttctcccatacaagctcttgttcgagaacaaacccattctggaaggtatagaagggggccagacttccagagtcaagctacccgcacctaagtcacaggacaaagctggctgtcaccaggatgggtgtaagacagcctctcaactcacctgtgcctaccattgactgaggaggaatcccaaaactgtgtgagactcctctgtcggtgaaactttctctctttcaccgttgcatgcaacatgtaaacatatagaaaactgggtcgggtgcagtgacttacgcctgtaatcccagcactttgggaggctgaggtgggcagatcacttaaggt

SEQ ID NO: 25 - DNA, 12613 bp, Homo sapiens
gaaaatccccactaagatcctgggtccagaaaaagatgggaaacctgtttagctcacccgtgagcccatagttaaaactctttagacaacaggttgtttccgtttacagagaacaataatattgggtggtgagcatctgtgtgggggttggggtgggataggggatacggggagagtggagaaaaaggggacacagggttaatgtgaagtccaggatccccctctacatttaaagttggtttaagttggctttaattaatagcaactcttaagataatcagaattttcttaaccttttagccttactgttgaaaagccctgtgatcttgtacaaatcatttgcttcttggatagtaatttcttttactaaaatgtgggcttttgactagatgaatgtaaatgttcttctagctctgatatcctttattctttatattttctaacagattctgtgtagtgggatgagcagagaacaaaaacaaaataatccagtgagaaaagcccgtaaataaaccttcagaccagagatctattctctagcttattttaagctcaacttaaaaagaagaactgttctctgattcttttcgccttcaatacacttaatgatttaactccaccctccttcaaaagaaacagcatttcctacttttatactgtctatatgattgatttgcacagctcatctggccagaagagctgagacatccgttcccctacaagaaactctccccggtaagtaacctctcagctgcttggcctgttagttagcttctgagatgagtaaaagactttacaggaaacccatagaagacatttggcaaacaccaagtgctcatacaattatcttaaaatataatctttaagataaggaaagggtcacagtttggaatgagtttcagacggttataacatcaaagatacaaaacatgattgtgagtgaaagactttaaagggagcaatagtattttaataactaacaatccttacctctcaaaagaaagatttgcagagagatgagtcttagctgaaatcttgaaatcttatcttctgctaaggagaactaaaccctctccagtgagatgccttctgaatatgtgcccacaagaagttgtgtctaagtctggttctcttttttctttttcctccagacaagagggaagcctaaaaatggtcaaaattaatattaaattacaaacgccaaataaaattttcctctaatatatcagtttcatggcacagttagtatataattctttatggttcaaaattaaaaatgagcttttctaggggcttctctcagctgcctagtctaaggtgcagggagtttgagactcacagggtttaataagagaaaattctcagctagagcagctgaacttaaatagactaggcaagacagctggttataagactaaactacccagaatgcatgacattcatctgtggtggcagacgaaacattttttattatattatttcttgggtatgtatgacaactcttaattgtggcaactcagaaactacaaacacaaacttcacagaaaatgtgaggattttacaattggctgttgtcatctatgaccttccctgggacttgggcacccggccatttcactctgactacatcatgtcaccaaacatctgatggtcttgccttttaattctcttttcgaggactgagagggagggtagcatggtagttaagagtgcaggcttcccgcattcaaaatcggttgcttactagctgtgtggctttgagcaagttactcaccctctctgtgcttcaaggtccttgtctgcaaaatgtgaaaaatatttcctgcctcataaggttgccctaaggattaaatgaatgaatgggtatgatgcttagaacagtgattggcatccagtatgtgccctcgaggcctcttaattattactggcttgctcatagtgcatgttctttgtgggctaactctagcgtcaataaaaatgttaagactgagttgcagccgggcatggtggctcatgcctgtaatcccagcattctaggaggctgaggcaggaggatcgcttgagcccaggagttcgagaccagcctgggcaacatagtgtgatcttgtatctataaaaataaacaaaattagcttggtgtggtggcgcctgtagtccccagccacttggaggggtgaggtgagaggattgcttgagcccgggatggtccaggctgcagtgagccatgatcgtgccactgcactccagcctgggcgacagagtgagaccctgtctcacaacaacaacaacaacaacaaaaaggctgagctgcaccatgcttgacccagtttcttaaaattgttgtcaaagcttcattcactccatggtgctatagagcacaagattttatttggtgagatggtgctttcatgaattcccccaacagagccaagctctccatctagtggacagggaagctagcagcaaaccttcccttcactacaaaacttcattgcttggccaaaaagagagttaattcaatgtagacatctatgtaggcaattaaaaacctattgatgtataaaacagtttgcattcatggagggcaactaaatacattctaggactttataaaagatcactttttatttatgcacagggtggaacaagatggattatcaagtgtcaagtccaatctatgacatcaattattatacatcggagccctgccaaaaaatcaatgtgaagcaaatcgcagcccgcctcctgcctccgctctactcactggtgttcatctttggttttgtgggcaacatgctggtcatcctcatcctgataaactgcaaaaggctgaagagcatgactgacatctacctgctcaacctggccatctctgacctgtttttccttcttactgtccccttctgggctcactatgctgccgcccagtgggactttggaaatacaatgtgtcaactcttgacagggctctattttataggcttcttctctggaatcttcttcatcatcctcctgacaatcgataggtacctggctgtcgtccatgctgtgtttgctttaaaagccaggacggtcacctttggggtggtgacaagtgtgatcacttgggtggtggctgtgtttgcgtctctcccaggaatcatctttaccagatctcaaaaagaaggtcttcattacacctgcagctctcattttccatacagtcagtatcaattctggaagaatttccagacattaaagatagtcatcttggggctggtcctgccgctgcttgtcatggtcatctgctactcgggaatcctaaaaactctgcttcggtgtcgaaatgagaagaagaggcacagggctgtgaggcttatcttcaccatcatgattgtttattttctcttctgggctccctacaacattgtccttctcctgaacaccttccaggaattctttggcctgaataattgcagtagctctaacaggttggaccaagctatgcaggtgacagagactcttgggatgacgcactgctgcatcaaccccatcatctatgcctttgtcggggagaagttcagaaactacctcttagtcttcttccaaaagcacattgccaaacgcttctgcaaatgctgttctattttccagcaagaggctcccgagcgagcaagctcagtttacacccgatccactggggagcaggaaatatctgtgggcttgtgacacggactcaagtgggctggtgacccagtcagagttgtgcacatggcttagttttcatacacagcctgggctgggggtggggtgggagaggtcttttttaaaaggaagttactgttatagagggtctaagattcatccatttatttggcatctgtttaaagtagattagatcttttaagcccatcaattatagaaagccaaatcaaaatatgttgatgaaaaatagcaacctttttatctccccttcacatgcatcaagttattgacaaactctcccttcactccgaaagttccttatgtatatttaaaagaaagcctcagagaattgctgattcttgagtttagtgatctgaacagaaataccaaaattatttcagaaatgtacaactttttacctagtacaaggcaacatataggttgtaaatgtgtttaaaacaggtctttgtcttgctatggggagaaaagacatgaatatgattagtaaagaaatgacacttttcatgtgtgatttcccctccaaggtatggttaataagtttcactgacttagaaccaggcgagagacttgtggcctgggagagctggggaagcttcttaaatgagaaggaatttgagttggatcatctattgctggcaaagacagaagcctcactgcaagcactgcatgggcaagcttggctgtagaaggagacagagctggttgggaagacatggggaggaaggacaaggctagatcatgaagaaccttgacggcattgctccgtctaagtcatgagctgagcagggagatcctggttggtgttgcagaaggtttactctgtggccaaaggagggtcaggaaggatgagcatttagggcaaggagaccaccaacagccctcaggtcagggtgaggatggcctctgctaagctcaaggcgtgaggatgggaaggagggaggtattcgtaaggatgggaaggagggaggtattcgtgcagcatatgaggatgcagagtcagcagaactggggtggatttgggttggaagtgagggtcagagaggagtcagagagaatccctagtcttcaagcagattggagaaacccttgaaaagacatcaagcacagaaggaggaggaggaggtttaggtcaagaagaagatggattggtgtaaaaggatgggtctggtttgcagagcttgaacacagtctcacccagactccaggctgtctttcactgaatgcttctgacttcatagatttccttcccatcccagctgaaatactgaggggtctccaggaggagactagatttatgaatacacgaggtatgaggtctaggaacatacttcagctcacacatgagatctaggtgaggattgattacctagtagtcatttcatgggttgttgggaggattctatgaggcaaccacaggcagcatttagcacatactacacattcaataagcatcaaactcttagttactcattcagggatagcactgagcaaagcattgagcaaaggggtcccatagaggtgagggaagcctgaaaaactaagatgctgcctgcccagtgcacacaagtgtaggtatcattttctgcatttaaccgtcaataggcaaaggggggaagggacatattcatttggaaataagctgccttgagccttaaaacccacaaaagtacaatttaccagcctccgtatttcagactgaatgggggtggggggggcgccttaggtacttattccagatgccttctccagacaaaccagaagcaacagaaaaaatcgtctctccctccctttgaaatgaatataccccttagtgtttgggtatattcatttcaaagggagagagagaggtttttttctgttctgtctcatatgattgtgcacatacttgagactgttttgaatttgggggatggctaaaaccatcatagtacaggtaaggtgagggaatagtaagtggtgagaactactcagggaatgaaggtgtcagaataataagaggtgctactgactttctcagcctctgaatatgaacggtgagcattgtggctgtcagcaggaagcaacgaagggaaatgtctttccttttgctcttaagttgtggagagtgcaacagtagcataggaccctaccctctgggccaagtcaaagacattctgacatcttagtatttgcatattcttatgtatgtgaaagttacaaattgcttgaaagaaaatatgcatctaataaaaaacaccttctaaaataattcattatattcttgctctttcagtcaagtgtacatttagagaatagcacataaaactgccagagcattttataagcagctgttttcttccttagtgtgtgtgcatggaaaatccccactaagatcctgggtccagaaaaagatgggaaacctgtttagctcacccgtgagcccatagttaaaactctttagacaacaggttgtttccgtttacagagaacaataatattgggtggtgagcatctgtgtgggggttggggtgggataggggatacggggagagtggagaaaaaggggacacagggttaatgtgaagtccaggatccccctctacatttaaagttggtttaagttggctttaattaatagcaactcttaagataatcagaattttcttaaccttttagccttactgttgaaaagccctgtgatcttgtacaaatcatttgcttcttggatagtaatttcttttactaaaatgtgggcttttgactagatgaatgtaaatgttcttctagctctgatatcctttattctttatattttctaacagattctgtgtagtgggatgagcagagaacaaaaacaaaataatccagtgagaaaagcccgtaaataaaccttcagaccagagatctattctctagcttattttaagctcaacttaaaaagaagaactgttctctgattcttttcgccttcaatacacttaatgatttaactccaccctccttcaaaagaaacagcatttcctacttttatactgtctatatgattgatttgcacagctcatctggccagaagagctgagacatccgttcccctacaagaaactctccccggtaagtaacctctcagctgcttggcctgttagttagcttctgagatgagtaaaagactttacaggaaacccatagaagacatttggcaaacaccaagtgctcatacaattatcttaaaatataatctttaagataaggaaagggtcacagtttggaatgagtttcagacggttataacatcaaagatacaaaacatgattgtgagtgaaagactttaaagggagcaatagtattttaataactaacaatccttacctctcaaaagaaagatttgcagagagatgagtcttagctgaaatcttgaaatcttatcttctgctaaggagaactaaaccctctccagtgagatgccttctgaatatgtgcccacaagaagttgtgtctaagtctggttctcttttttctttttcctccagacaagagggaagcctaaaaatggtcaaaattaatattaaattacaaacgccaaataaaattttcctctaatatatcagtttcatggcacagttagtatataattctttatggttcaaaattaaaaatgagcttttctaggggcttctctcagctgcctagtctaaggtgcagggagtttgagactcacagggtttaataagagaaaattctcagctagagcagctgaacttaaatagactaggcaagacagctggttataagactaaactacccagaatgcatgacattcatctgtggtggcagacgaaacattttttattatattatttcttgggtatgtatgacaactcttaattgtggcaactcagaaactacaaacacaaacttcacagaaaatgtgaggattttacaattggctgttgtcatctatgaccttccctgggacttgggcacccggccatttcactctgactacatcatgtcaccaaacatctgatggtcttgccttttaattctcttttcgaggactgagagggagggtagcatggtagttaagagtgcaggcttcccgcattcaaaatcggttgcttactagctgtgtggctttgagcaagttactcaccctctctgtgcttcaaggtccttgtctgcaaaatgtgaaaaatatttcctgcctcataaggttgccctaaggattaaatgaatgaatgggtatgatgcttagaacagtgattggcatccagtatgtgccctcgaggcctcttaattattactggcttgctcatagtgcatgttctttgtgggctaactctagcgtcaataaaaatgttaagactgagttgcagccgggcatggtggctcatgcctgtaatcccagcattctaggaggctgaggcaggaggatcgcttgagcccaggagttcgagaccagcctgggcaacatagtgtgatcttgtatctataaaaataaacaaaattagcttggtgtggtggcgcctgtagtccccagccacttggaggggtgaggtgagaggattgcttgagcccgggatggtccaggctgcagtgagccatgatcgtgccactgcactccagcctgggcgacagagtgagaccctgtctcacaacaacaacaacaacaacaaaaaggctgagctgcaccatgcttgacccagtttcttaaaattgttgtcaaagcttcattcactccatggtgctatagagcacaagattttatttggtgagatggtgctttcatgaattcccccaacagagccaagctctccatctagtggacagggaagctagcagcaaaccttcccttcactacaaaacttcattgcttggccaaaaagagagttaattcaatgtagacatctatgtaggcaattaaaaacctattgatgtataaaacagtttgcattcatggagggcaactaaatacattctaggactttataaaagatcactttttatttatgcacagggtggaacaagatggattatcaagtgtcaagtccaatctatgacatcaattattatacatcggagccctgccaaaaaatcaatgtgaagcaaatcgcagcccgcctcctgcctccgctctactcactggtgttcatctttggttttgtgggcaacatgctggtcatcctcatcctgataaactgcaaaaggctgaagagcatgactgacatctacctgctcaacctggccatctctgacctgtttttccttcttactgtccccttctgggctcactatgctgccgcccagtgggactttggaaatacaatgtgtcaactcttgacagggctctattttataggcttcttctctggaatcttcttcatcatcctcctgacaatcgataggtacctggctgtcgtccatgctgtgtttgctttaaaagccaggacggtcacctttggggtggtgacaagtgtgatcacttgggtggtggctgtgtttgcgtctctcccaggaatcatctttaccagatctcaaaaagaaggtcttcattacacctgcagctctcattttccatacagtcagtatcaattctggaagaatttccagacattaaagatagtcatcttggggctggtcctgccgctgcttgtcatggtcatctgctactcgggaatcctaaaaactctgcttcggtgtcgaaatgagaagaagaggcacagggctgtgaggcttatcttcaccatcatgattgtttattttctcttctgggctccctacaacattgtccttctcctgaacaccttccaggaattctttggcctgaataattgcagtagctctaacaggttggaccaagctatgcaggtgacagagactcttgggatgacgcactgctgcatcaaccccatcatctatgcctttgtcggggagaagttcagaaactacctcttagtcttcttccaaaagcacattgccaaacgcttctgcaaatgctgttctattttccagcaagaggctcccgagcgagcaagctcagtttacacccgatccactggggagcaggaaatatctgtgggcttgtgacacggactcaagtgggctggtgacccagtcagagttgtgcacatggcttagttttcatacacagcctgggctgggggtggggtgggagaggtcttttttaaaaggaagttactgttatagagggtctaagattcatccatttatttggcatctgtttaaagtagattagatcttttaagcccatcaattatagaaagccaaatcaaaatatgttgatgaaaaatagcaacctttttatctccccttcacatgcatcaagttattgacaaactctcccttcactccgaaagttccttatgtatatttaaaagaaagcctcagagaattgctgattcttgagtttagtgatctgaacagaaataccaaaattatttcagaaatgtacaactttttacctagtacaaggcaacatataggttgtaaatgtgtttaaaacaggtctttgtcttgctatggggagaaaagacatgaatatgattagtaaagaaatgacacttttcatgtgtgatttcccctccaaggtatggttaataagtttcactgacttagaaccaggcgagagacttgtggcctgggagagctggggaagcttcttaaatgagaaggaatttgagttggatcatctattgctggcaaagacagaagcctcactgcaagcactgcatgggcaagcttggctgtagaaggagacagagctggttgggaagacatggggaggaaggacaaggctagatcatgaagaaccttgacggcattgctccgtctaagtcatgagctgagcagggagatcctggttggtgttgcagaaggtttactctgtggccaaaggagggtcaggaaggatgagcatttagggcaaggagaccaccaacagccctcaggtcagggtgaggatggcctctgctaagctcaaggcgtgaggatgggaaggagggaggtattcgtaaggatgggaaggagggaggtattcgtgcagcatatgaggatgcagagtcagcagaactggggtggatttgggttggaagtgagggtcagagaggagtcagagagaatccctagtcttcaagcagattggagaaacccttgaaaagacatcaagcacagaaggaggaggaggaggtttaggtcaagaagaagatggattggtgtaaaaggatgggtctggtttgcagagcttgaacacagtctcacccagactccaggctgtctttcactgaatgcttctgacttcatagatttccttcccatcccagctgaaatactgaggggtctccaggaggagactagatttatgaatacacgaggtatgaggtctaggaacatacttcagctcacacatgagatctaggtgaggattgattacctagtagtcatttcatgggttgttgggaggattctatgaggcaaccacaggcagcatttagcacatactacacattcaataagcatcaaactcttagttactcattcagggatagcactgagcaaagcattgagcaaaggggtcccatagaggtgagggaagcctgaaaaactaagatgctgcctgcccagtgcacacaagtgtaggtatcattttctgcatttaaccgtcaataggcaaaggggggaagggacatattcatttggaaataagctgccttgagccttaaaacccacaaaagtacaatttaccagcctccgtatttcagactgaatgggggtggggggggcgccttaggtacttattccagatgccttctccagacaaaccagaagcaacagaaaaaatcgtctctccctccctttgaaatgaatataccccttagtgtttgggtatattcatttcaaagggagagagagaggtttttttctgttctgtctcatatgattgtgcacatacttgagactgttttgaatttgggggatggctaaaaccatcatagtacaggtaaggtgagggaatagtaagtggtgagaactactcagggaatgaaggtgtcagaataataagaggtgctactgactttctcagcctctgaatatgaacggtgagcattgtggctgtcagcaggaagcaacgaagggaaatgtctttccttttgctcttaagttgtggagagtgcaacagtagcataggaccctaccctctgggccaagtcaaagacattctgacatcttagtatttgcatattcttatgtatgtgaaagttacaaattgcttgaaagaaaatatgcatctaataaaaaacaccttctaaaataattcattatattcttgctctttcagtcaagtgtacatttagagaatagcacataaaactgccagagcattttataagcagctgttttcttccttagtgtgtgtgcatgtgtgtgtgatgtatacaaagagagagataattgtatttttgtattttcttttaaataatttttaaaattgacccttttcctgagacaaattgccagaatagtttgtatttagagatggtacctctaagagtaaggttgctggttgctgagcaattgacttgaaaacttttaaaattcaaattttaattccactactcaaaagaattgccatgttttaaaaaagagaattggtgccataagttagttgtctatgtttgaaaatgaagaagatatgcaacgtcatggcctggtcacttacccgcagccctgagttgtaggcacatcatatgtgagaatgaggatgcttttctttcatttaaaatccctccccaaaacttggctctaattgcagtcatgacaatcatgtacatttggatttatgtgcacgagtctcttaccctgagagaggacaggtgctacaggtggaggggacccgtctgggtcacgttcacat

SEQ ID NO: 26 - DNA, 61549 bp, Homo sapiens
tctcgtactcctgaccttgagtgatccacctgcctcggcctcccaaagtgctgggattacaggcatgagccaccgcgccgggctaatatgctcattttagtgaggcaaaaatagaggctcagagtctgatttgtacaaaactacagagcagttaagtgtcctctcagatgtgtaccctgatctgggtgactctaggactctaggtctcaactgttacaaccagttaagggtttggggaagcactgggccaagagtcaggaaaatggaagccacaggtagtgcaaggtcttgggaatgggacgtctggtccaaggattcacgcgatgactggaacccgaagagccggggcccggtttacggccgccatgaagcaacgcgcgccggtaggtttgggaatcagggagccctctgaataggagactgagttgggagggaaaggggcttcgctgggggagcctcggcttcttctgggagaaaattcccacggctacctagtgagcctgcaaactggtaggcgccggcgtaggcgcgcgggcggggccgggggcggggcctgcggggcgtggcggggcgggcagagggcggggcctgcttctcctcagcttcaggcggctgcgacgagccctcaggcgaacctctcggctttcccgcgcggcgccgcctcttgctgcgcctccgcctcctcctctgctccgccaccggcttcctcctcctgagcagtcagcccgcgcgccggccggctccgttatggcgacccgcagccctggcgtcgtggtgagcagctcggcctgccggccctggccggttcaggcccacgcggcaggtggcggccgggccctgaggcgcgggatccgcagtgcgggctcgggcggccgggcccagggaaccccgcaggcgggggcggccagtttcccgggttcggctttacgtcacgcgagggcggcagggaggacggaatggcggggtttggggtgggtccctcctcgggggagccctgggaaaagaggactgcgtgtgggaagagaaggtggaaatggcgttttggttgacatgtgccgcctgcgagcgtgctgcggggaggggccgagggcagattcgggaatgatggcgcggggtgggggcgtgggggctttctcgggagaggcccttccctggaagtttggggtgcgatggtgaggttctcggggcacctctggaggggcctcggcacggaaagcgaccacctgggagggcgtgtggggaccaggttttgcctttagttttgcacacactgtagttcatctttatggagatgctcatggcctcattgaagccccactacagctctggtagcggtaaccatgcgtatttgacacacgaaggaactagggaaaaggcattaggtcatttcaagccgaaattcacatgtgctagaatccagattccatgctgaccgatgccccaggatatagaaaatgagaatctggtccttaccttcaagaacattcttaaccgtaatcagcctctggtatcttagctccaccctcactggttttttcttgtttgttgaaccggccaagctgctggcctccctcctcaaccgttctgatcatgcttgctaaaatagtcaaaaccccggccagttaaatatgctttagcctgctttattatgattatttttgttgttttggcaatgacctggttacctgttgtttctcccactaaaactttttaagggcaggaatcaccgccgtaactctagcacttagcacagtacttggcttgtaagaggtcctcgatgatggtttgttgaatgaatacattaaataattaaccacttgaaccctaagaaagaagcgattctatttcatattaggcattgtaatgacttaaggtaaagagcagtgctattaacggagtctaactgggaatccagcttgtttgggctatttactagttgtgtggctgtgggcaacttacttcacctctctgggcttaagtcattttatgtatatctgaggtgctggctacctcttggagttattgagaggattataagacagtctatgtgaatcagcaacccttgcatggcccctggcggggaacagtaataatagccatcatcatgtttacttacatagtcctaattagtcttcaaaacagccctgtagcaatggtatgattattaccattttacagatgaggaacctttgaagcctcagagaggctaacagacataccctaggtcatacagttattaagagaaggagctctgtctcgaacctagctctctctctctcgagtaataccagttaaaaaataggctacaaataggtactcaaaaaaatggtagtggctgttgtttttattcagttgctgaggaaaaaatgttgatttttcatctctaaacatcaacttacttaattctgccaatttcttttttttgagacagggtctcactctgtcacctaggatggagtgcagtggcacaatcactgctcactgcagcctcgacttcccgggctcgggtgattctccccaggctcaggggattctcccacttcagcctcccaagtagctgggactacaggtgcgcaccaccatccctggctaatatttgtactttattttatttatttatttatttattttttgagatggagtttcgctcttgttgcccgggctggagtacagtggcatgatctcggctcagtgcaacctctgcctcccgggttcaagcgattctcctacctcatccccctgagtagctgggattacaggcgcctgccaccatgcctggctaattttttgtatttttaatagagacgaggtttcaccatgttggccaggctactctcgaactcctgatctcaggtgatccacccgccttggcctcccaaagtgctgggattacaggcgtgagccactgcgcccggcctaatatttgtattttttgtagagatggtgttttgccatgttgtccaggctggtcttgaactcctgagctcaagcgatctgcccgcctctgcttcccaaagtgctgggattacaggcatgagccaccgtgcctggcctaggtagacgcttttagctttggggtgtgatgcctgccccagtatatagtgaatttaattattgctagagctggctgtttgttagttttctttgaacataagatactcattgtttttagtttgcaaatccctcttcctttttaaaaaatttctttcccttaaattgtttgcatgttagcaataacaaatgcttaaatggtgctatgtgctagatactcttctaagccctgttatgtatattaactaattttttaaattacacaaatcagagaggttaagtaacttgcccaagattacccaacaatactaggatttgaacctaagtttgtctcaccccagattctgctcttaatctctaaacttttaagttagtagtgacaatagtaggtatttattgaatacttaactatgttttaggcgttgaagtaaatattttgcaggcattatctaatgtaaacaccctaaagttacataacaggtaccctttaggtaaataaacactagtatgaccttggaggcacagatagttgaagtaacttgcccaatatcacttacatgaaattggccctcaaatgtgtctgatacaacccatgctgcttgtaactatcgttttaaactgccagggtaaacttggacacacttgagctaagaaaaagcttttagatttttgcaaattaatgtgaaagatatgctttatgtggatataatatcttctaaatttcggggatggtagtcctagaaatgtaatcctgccctagccgagcttaccctgccaataattttttacagaattggtaaaacggagcaccttttttttgtccttggccacactgttatcaacagggtgtagattgacatcaatctgtaggtgtaaaccagaattactctttgtgaccaccaggaaatagagcagttcagttcaggggtttctttctgtgaatttagcactgtgacctgcatactacaagtctactttgttttctatccattgtttgtatctgggtattgcaaaaggtaggaaaaggaccaaccagatcagcagagaagagttgccttggagttttcttttagttttctgcagttcattagatagtaactaggccatgtcattttactcccttgtagtgaagatatgttgaagttgtactggtatactcttctacctttctgtaattttatattgtgtagacttgataaaatttatgtgtcaatcaccaccattaatatcaatattgagcctcaattcttatttttctgcccagtggctgccaaattactaacatttacaataattcactactactaagataatctactagttcgatcacatacttcaaattgttatggaactactgtcttcagcattgtgcttctgataactgataagtataattttttttttgtccagagtgaacatgtctattcttccactgtacacactaataaaaggaaaaattgtaatattgggtaaattcatgtccttacacatgtagtagttatgagcccatgtccctagaatgagtaataatttatccctcccttggttgaatagtcaagaatgctgattttaattcttctaacagctttatccctcagaagggaaggcaagcaagttatatatgtagtttatttgtaagactgatatgaaattggaagatgaatctactattagctttaattatttttacatttaggaatattgcatcagtaactcataattttggttttctgttatcctgagttaacacaaattatccaaggagatggcggatcatctgctttgaggtgtttttttttgagaattttaatgtatctgaatataaaaggtaaaaatatgccaactagcaatttctgcccattccagaagtttggaaatattactcattactaggaattaaataaaatatggtttatctattgttatacctcttttaattcacatagctcatttttatcttttatttttgtttgttttttttgagatggagtcttgctctgtcaccaggcaggagtgcagtgatgcaatctcggctcactctagccaccgactccctggttcaagcgattctcctgcctgagccttctgagtagctgggattacaggcaggcaccaccacgcccagctaatttttgtagagacaggatttcaccgtgttggccaggatggtctccatctcctgacctcatgatctgcctgcttcggcctcccaaagtgctgggattacaggtgggagccactacgcctggcccacatagctcatttttagactcacttccattaagtcttgtttggacccacgaacattgtctttttttttttaagatggagtttcacttttgttgcccagactgtagtgcaatggtgcaatctcagctcactgcaatctctgcctcctgggttctagcaattctcctgcctcagcctcccgagtagctggaattacaggcgcccgccaccacgcccagctaatttttgtgtttttagtagagacggggtttcaccatgttgggcaggccaggggtgatccgcccacctcagcctcccaaagtgctgggattacaggtgtgagccaccgcatctggccaacatgtcttttttttttttttcctttttaaccacaaagagacttaagcagtccttgtcacagatgatgaattgatgttgcaagtattgtcttagcttggattaattttcttgcttactgtaattttagataatatagctttgtaattagagattttatgtgtaaaccacaaaaatgtttacatgaaggccattattacagatgtgacgtgcataattattagtaatttgtatgtttacatgggtcagtctggcaaaaaattatgaagttttaaaaattaaaaaaaattataatgccagttttactggaaagtaaaattatttcagtaatcgattatagcaaaagtattgattttcattccagacaaaagtcagaatgaaaggtaatttctcaatactctttcagattaataaaagtacctgtagcgatttttatcattcacaagtatatcacaagtaagttagaatttgagaactgtgttctagatctctgaggagatgcagtcagatttctgaactgtctcagcaaatggtaagtaacttagagctagtaattaataacctgtcctttgatttctgattcagccaagaatggccatatttgggaaaggcagatctggagagtaaccacgttttcattcatttaccacttctaggcccctccagagctctcagatattttggggttgagcccttccccaaagccatacaggaccttttttttgtgatctgttctagccatttttatgttgggtgcttgttatggactgagcatttatgtcctcccacaccccccccataccttttttgaagtcctaacccccagtgtgatggtatttggagacagggcctttggaaggtaattacagttagaagaagtcgggagggttgggcccaggtctgattggattagtgcccttatatgaaaagacaccaggacgggcgcagtggctcacacctgtaatcccagcactttgggaggccaaggtgggtggatcacgaggtcaggagtttgagaccagcctggccaatgtagtgaaacaccatctctactaaaaatacaaaaattagctgggtgtggtagcgggctcctgtcatccaagctactcgggagggtgaggcatgagaatcacttgaacccgggagttggaggttgcagtgagcccagattgtgccactgtactccagcctgggtgacagagtgagactctgtctcaaaaaagaaaaaaaaaaaaaaagagacaccagagagcttgttagaagaggtcatgtgagcacacagttagaagaccttcaagccaaagaagaggcctgagattgaaacctaccttgcaggtaccttaattttggacttcccagcctccaaaactgtgagaaataagtttctgttaagtcactcagtctgtggtattttgttatggcagcctgagcaggtagttgttctttcagaaggtgttgataataaccacatgcaacaccaagtcacaaataataaaacagatgtaacttatattcatacagaaagttgggcactgccattgccttgttggtttacacggctgtgctagttcagtagcagaaaggtgctggtctcctttactcagtttacaatctaggcagtagaatgtaatcactgctttaaacttgatactgcttagggagagaatcattggtgctgggtaactttgggttctaggtttactttttgtgtatatataactgtttttggtaaatcacaagtttctgggcttgtcgaattagattttgttacagattatgagctttattatgctatacagttagttgtatgtatatatgcctttcccactagattttaagctttttttttttttttttttttgtgacggagtcttgctcttgtcgcccaggctgaagtggagtgcagtggcacaatctcggctcactgcagcctccacctcctaggttcaagcgattctcctgcctcggcctcccaagtaactgggactacaggcacgtgccaccacacccggctaatttttgtattttttgtagagacagggtttcgccatgttggctaggctggtcttgaacttctggcctcaggtgatccacccgcctcagcctcccaaagtgctgggatttacaggcatgagccaccacgcccagctataagctctttaagggttgtaaatttataatcattcttttactctcctgcaaattctgttgcacactgccttaatcaaggtagatgctgaatgcatttttgtataattgaatatgttgcaatccccaactctctccaactgttcctgtcaaagcagccactggattgttaactaatccatattagatggggttaattaatatcagatgggacaagtaagggctaataagattataggccaccaagtagatttctgtctagctcttatagagattgagtttattggacctgtttgataggaagttttggtgtttgggatgattaaaactgaagttcctatttattgaattatacctatttatattatttcatatcagtggtccacatgcaagtgaggcttctgagacagagtttgagttctctcttcaactaccataacacttaacctgtatctttttttttttttttttttttagacggagtctcgctctgtcactcaggctggagtgtagtggtatgatctcggctcactgtaacctctgcctcctggattcaagcagttctccatgtctcagcctccctagtagctgggattacaggcctgtgccaccatgcctggctaattttttttttgtatttttagtagagacggggttttaccacgttggccaggctggtctcgaactcttgacctcgagcgatcaacttgccttggcctcccaaagtgctgggattacaggcatgagccacagcgcccagccgtctttttttttaaatagcaatttaacactgttcacagttactcatgtacatgtcatgccatctattacactgtaagttctgtgagggtagctgtatcaaatttatctaactctctctagtatgcatgacatagtaagtattcaataaatatttgcatattagtgataaggatacaggttctgaatagtgggtccttaccatttaagaattagtatttgatggccgggcggggtggctcacgcctgtaatcccagcactttgggaggctgaggcgggcggatcatgagatcaggagatcgagaccatcctggctaacatggtgaaatcccgtctttacaaaaaaaatacaaaagaattaaccaagtgtggtggtgggtgcctgtagtcccagctactgctttgtgaggctgaggcaggcagatcacctgaggtgggaaattcaagaccagcctgaccaacatggagaaaccccatctctactaaaaatacaaaattagccgggcgtggtggcgcatgtctgtaatcccagctactcgggaggctgaggcaggagaatggcgtgaacccgggaggcggagcttgcagtgagccaggatcgcgccactgcactccagcctgggcgacagagcgagactccgtctcaaaaaaaaaaaaaaaaaaaaaattagtatttgatatttgatcattaaatatgaattaagaggacttagactttttgttaaatgtcaagctgggaaaagttgtcatttaaatgaattgcctcttatttaatttcgtctgatgatacattttgtttttattttgtaaaaaattattttttttctttttggagacagggtcttgctctgttgcccaggctggtcacaaactcctgacctcaagcaatcctcctgccttagcctcccaaaatgctgggattacaggcgtgagccacctcgcccggccttgtattatgatacattttgaacaactacaagtagacttggtataatgaacctgcacgtacccattgccaagttctgacaactgtctgtctatagccaattatgcatttcttaaattagaacccccccaatatacccaaatatatatatatgtgtgcatatatatagtaagttgtaacaaagttgtgaattcatacctgaagtatctcaagtgatgcaagttttatgaatttttgtttatgccttttgggaagagttgtattgacaaattttttatgcttaaagtaaaccataaatcaaaaaaataaaatctaggatgcaataaaacaaaacaacttcttgacataagtatggtatgtaaatctgttttgattggaaatcaatttgttatattgccagaattcctgttttagaatacatctctgctgatctgtctgtattcttagactgcatatctgggatgaactctgggcagaattcacatgggcttcctttgaaataaacaagacttttcaaattcttagtcgatctgcagaacctgtagccaggcactgaaccattttgatagatgcagtaatcgttgcaagtgtatatttcaaggagttctggctgggtcctagtttatgcttgtggcagaagcagtgagtaactgggaggaagttggtgagtaagcttcaaggaagaagtcatttttagtactctggatcttcctgattttaaagcactacaaaatggtgcattttcattcttgtcaagtgataacagatatattctgatgagcctgaaatgaatatatattgtatcatttttataatatctagcaaggtttgtattttcctagaacttgaactaaatttcagttcataaaatttataaaatacttagttgttgtaaaatatttttggaatgttcacataggtgacacacaaatgtcccattttcattctttctatagtaaatatgttctgatatgtgaaggtttagcagatgcatcagcatttaatcctagaggatctggcataatcttttcccccaagaatagaaattttttctgcttatgaaagtagtacatgtttctttaaaaacaaatcaatattgacttctgcctgctgtatagcactatgcctccacctggccatgaccaggggcatgtcctggtccacctacctgaaaatgtttgcaaccagcctcctggccatgtgcacaggggctgaagttgtcccacaggtattacgggccaacctgacaatacatgaagttccaccaaagtctgagaactcagaactgagctttggggactgaaagacagcacaaacctcaaatttctcagcactggaaacctcaaaatataactgaattccataaataagattttaagtcttaaatatgtatttttaaatgtattaaaagtcaagctgcttgtatttaagcacctaatacaatgcttaggttgtaaaaggagatgctcaataggtactaactgatatattgagatttaattatggtttgaccaatatttattggaaaccgccaaagcttaaatcatcagcttcttgaatgtgatttgaaaggtaatttagtattgaatagcatgtgagctagagtatttcattctttctggtttatttcttcaaatagactttgaatataatggtgaatgggtattataaattaactaataaaaatgacattgaaaatgaaaaaatatatatattaaagtgtagaaagtgaccaggcgtggtggctcacacctgtaatccaagcaccttgggaggctgaggcaggaggatctcttgatcccaggagttcaagaccagcctgggcaacatagcgagacttcgtctctaaaaaaaaaaaagagagagaaaaaaattttttttatttaaaaaaagtgtagaaagtgtcaagaccccacttcttaccattatttggtatatttctctatacccacccacccttcctccttactccctccctcccttcccaatctttttatctttttgtattctgattttttgtttgtatattttgctttaatttaatgtatcctttaaaaatttcccatacattttatatgtatatataaaaacgcatgctgccaaagataatttataagaaagaccattgaatttttttaaaagtgatatatattcattgaaaaaaatttagaatatatagcaaagcaataaagaactaaataaaattgctgtaactcctctttcaaagataagtgcttttatgattttgttgtatttttttctgtatataggtacatatatagtatttataaagctgtactcatagtacattttcacatcacaggtaccatatcagtgttattaaatattttgtatgccaggggctagacataccaagacaaccaatatgtggttctacttaaataatattagagtatcttttatgatgacacttcatgagttgactataataatcttagacttctaagagtttgggttttcaaaagatcacttagcttttttgggtgatttttcccccttactgtgagatgagagaggctgtttggatttgggattggggtagcggggacagcaacttttcttttctttttcttttttattttgaggtagggtattgctgtgtcacccaggctggagtgcagtggtgtgatctcggctcactgcaacctccacctcccgggctcaggtgatcctcctgcttcagcctccccagtaactgggactacaggcgcgtgccacatgcctggctaattttgtatttttagtagagatggggtttcaccatgttggccaggctggtctctaactcctgacctcaggtgatacgcccacctgggcctcccaaaatactgggattacaggcatgagccgctgcatcagccagcagtttttcttgtggttttttttgtttgttttgttttgttttgtttttgagatagggtcttactctgttgtccacgctggagtgctgtggtatgatcgtagctcactgcagcctcaaactcctgggctcaagtgattccttctgcctccgcctcccgagtagctgggactacaggtatgcaccaccatacctggcaaatttttacaaagttttttgtagggacggggtcttgctacattccccatgtcggtcttgaactcctggcctcaagcaactctcctgtctcagcctcccaaagcactgggattacaagtgtgagccaccacaccatgccagtttttcctgttcagtgtgatattttatcttgttagactacagtgtgttaaaacttgttttactaaattttcaaacatactcaaaagtggagagaatagtataatgaatacccgtatgttcatcacccatgtttagaatattattaaatataaagattttgctgcgtttgtcttagctctttaaaatttttctttttctctttgtgacctaaaggaaattccatatcttatcactttacttctacattcttgactaagatgactaagacatatagttacatggttttttgttttgttttttgttttttaaagacgaaatctcgctcttgtcccccaggctggagtgcaatggtgccatctcagctcagtgcaacctctgccttctgggtacaagcgattctcctgcctcagcctcccaagtagctgggattacaggctcctgccaccacgcctggctaatttttgtatttttagtagagacggcggggggaggtttcaccatgttgacaaggctggtctggaactcctgacctcaggtgatccacccgcctcggcctcccaaagtgctgggattacaggcgtgagccaccgcgcccagcctgtttttttgtttgtttgttttgttttttttgagacagagtcttgctctgtttcccaggctggagtgaagtggcgcattcttggctcactgcaaccttcacctcccaggttcaagtgattctcctgcctcagcctcccaagtagctgggactacaggcatgtgtcaccacacccggctaatttttttgtatttttagtagagacgggatttcaccgtgttgcccaggctggtctcgaactcctgagctcaggcagtctgcctgcctcagcctcccaaagtgctgggattacacgtgtgaaccaacccgcccggcctgttgttttcttacataattcattatcatacctacaaagttaacagttactaatatcatcttacacctaaatttctctgatagactaaggttattttttaacatcttaatccaatcaaatgtttgtatcctgtaatgctctcattgaaacagctatatttctttttcagattagtgatgatgaaccaggttatgaccttgatttattttgcatacctaatcattatgctgaggatttggaaagggtgtttattcctcatggactaattatggacaggtaagtaagatcttaaaatgaggttttttactttttcttgtgttaatttcaaacatcagcagctgttctgagtacttgctatttgaacataaactaggccaacttattaaataactgatgctttctaaaatcttctttattaaaaataaaagaggagggccttactaattacttagtatcagttgtggtatagtgggactctgtagggaccagaacaaagtaaacattgaagggagatggaagaaggaactctagccagagtcttgcatttctcagtcctaaacagggtaatggactggggctgaatcacatgaaggcaaggtcagatttttattattatgcacatctagcttgaaaattttctgttaagtcaattacagtgaaaaaccttacctggtattgaatgcttgcattgtatgtctggctattctgtgtttttattttaaaattataatatcaaaatatttgtgttataaaatattctaactatggaggccataaacaagaagactaaagttctctcctttcagccttctgtacacatttcttctcaagcactggctatgcatgtatactatatgcaaaagtacatatatacatttatattttaacgtatgagtatagttttaaatgttattggacacttttaatattagtgtgtctagagctatctaatatattttaaaggttgcatagcattctgtcttatggagataccataactgatttaaccagtccactattgatagacactattttgttcttaccgactgtactagaagaaacattcttttacatgtttggtacttgttcagctttattcaagtggaatttctgggtcaaggggaaagagtttattgaatattttggtattgccaaattttcctctaagaagttgaatcattttatactcctgatgttatatgagagtacctttctcttcacaatttgtctcttttttttttttttttgagacaaggtctctgttgcccaggctggggtgcagtgcagcagaatgatcacagttcactgcagtctcaacctcctgggttcaagcgatccttccacctcagcctcctgagtagctgggactataggtgtgcgccaccactcccagctaatatttttattttgtagaaacagggttcgccatgttacccagcctcccaaagtgctgggattacaggcatgagccactggcccagtttctacagtctctcttaatattgtatattatccaagaaatttcatttaatcagaacctgccagtctgataggtgaaaatggtatcttgtttttatttgcatttaaaaaaaattatgatagtggtatgcttggtttttttgaaggtatcaaattttttaccttatgaaacatgagggcaaaggatgtgttacgtggaagatttaaaaaaaatttttaatgcatttttttgagacaaggtcttgctctattgtccaggctggagtgcagtggcacaatcacagttcactccagcctcaacatcctgcactaaagtgattttcccacctcacctctcaagtagctgggactacaggtacatgctaccatgcctggctaatttttttttttttgcaggcatggggtctcactatattgcccaggttggtgtggaagtttaatgactaagaggtgtttgttataaagtttaatgtatgaaactttctattaaattcctgattttatttctgtaggactgaacgtcttgctcgagatgtgatgaaggagatgggaggccatcacattgtagccctctgtgtgctcaaggggggctataaattctttgctgacctgctggattacatcaaagcactgaatagaaatagtgatagatccattcctatgactgtagattttatcagactgaagagctattgtgtgagtatatttaatatatgattctttttagtggcaacagtaggttttcttatattttctttgaatctctgcaaaccatacttgctttcatttcacttggttacagtgagatttttctaacatattcactagtactttacatcaaagccaatactgtttttttaaaactagtcaccttggaggatatatacttattttacaggtgtgtgtggttttttaaataaactccttttaggaattgctgttgggacttgggatacttttttcactatacatactggtgacagataccctctcttgagctacatcggtttgtggggagtcaaaagtcctttggagctaggtttgacaaataaggtgggttaacacttgtttcctagaaagcacatggagagctagagtattggcgaattgaagaaatccccctttttttttaacacacttaagaaaggggactgcaggtatactcaagagagtaagtcgcaccagaaaccacttttgatccacagtctgcctgtgtcacacaattgaaatgcatcacaacattgacactgtggatgaaacaaaatcagtgtgaattttagtagtgaatttcattcataatttgatcgtgcaaacgtttgatttttattactttagactattgtttctgattttatgttgggttggtatttcctgtgagttactgttttcctttaaaataggaatttttcatactcttcaaagattagaacaaatgtccagtttttgctgtttcatgaatgagtcctgtccatctttgtagaaactcgccttatgttcacatttttattgagaataagaccacttatctacatttaactatcaacctcatcctctccattaatcatctattttagtgacccaagtttttgaccttttccatgtttacatcaatcctgtaggtgattgggcagccatttaagtattattatagacattttcactatcccattaaaaccctttatgcccatacatcataacactacttcctacccataagctccttttaacttgttaaagtcttgcttgaattaaagacttgtttaaacacaaaatttagacttttactcaacaaaagtgattgattgattgattgattgattgatggtttacagtaggacttcattctagtcattatagctgctggcagtataactggccagcctttaatacattgctgcttagagtcaaagcatgtacttagagttggtatgatttatctttttggtcttctatagcctccttccccatccccatcagtcttaatcagtcttgttacgttatgactaatctttggggatttgtgcagaatgttattttagataagcaaaaacgagcaaaataggggagtttaactttaatattttcttttaaaaagcatttcatgttataagatcaattctgagtggtagaaatgctttgacattttatttccattttctacttttagtttttttcctatttgtttaagatcttagaggattattaagctgaactcctcaactgataaaaagcatgacatcttaaacataagcaaagcatatttttaggttaattttcacatagaaaacagtttattttatgtgaaattctatgtagatatactatttttttggtatttattgatatgtttattttattttattttattttattttattttattttattttatttatttatttttttttttgagacagagtctcactctgttgcccaggctggagtgcagtggcatgatcgtagctcactgcaacctccacctcccgggttcaagcaattcttctgtctcagcctcccgagtagctgggactacaggtgcctgccactatgcccggctaatttttgtgtttttagtagagatggggtttcaccttgttggtcaggctggtctcgaacccctgacctcaggtgatccacccacctcagcctcccaaagtgctgggattataggcatgagccaccgtgcccggccgacatgttaattttttaaaaaaggctttactggggtatattttatataatataataatcacatgttttaactatacaattccaagctttttagtatatttatagggctatgcaaggaagatatactgttaaacagtagaaattgagaaagctcttctgataatatctcttgatttgatgatggctcatgcctgtaatctcagtgctttggaaggccaagacagcagaatcacttgaggccaggggttcgagaccagcctgggcaacacagcaataccctatctttacaaataataaaaatatctgttgatttgaagtaaagtttttttttaaagacaaggtctcattctgtcacccaggctggaatgcagtagcaagatcacagctcactgtggccttgaccttctgggctcaagtgattctcccacttcggcctcccgagtagctgggactaacaggtgtgcaccaccatggctggctaatttttttttatgtttgtagagattgggtcttactgtgttgcccaggctgatcccgaactcctgggctcaagcagtcttcctgcctcagcctctaaaattgctgggattacaggcttgagtcaccatgcccagcctgaagtagcatttctaccctgtttaataattcagcagcttgtcatgtaagatattcatatatgcatataaaacattaggcagcttaatttggtaaaactgtaaaatggaaattttaaattgtttgcagcatcaataacattgatgtcagtatgatttttacatgctgatcttgaccaatttgaaacagtgagttaaaatctggctgatccgtactaatcctaaagaaatattctatgaactattaaatgtttccagaatatataaagaaacattatgatgtcaacacacccatctatttttttttggaaataaaaactccatttttcttattaaagaaaacatgcttattagaaaacatacggctgggtgcagtggcacacatgtaattccagtgctttgggagatcgaggtgggagaatcacttgaggccaggagtttgagaccagcctagacaacataatgagaccccctctctacacaaaaagaattagttgtgcatggtggcgtgcacctgtagtcccagctacttgggaggcagaggcaggagcatcccttgagcctaggagtttgagactgcaggagttcgagactgagtggaatgcagtggaactgcattccagcctgagtgacagagggagaccctgtcttaaaaaaataagaaagaaaacacaactgcagaaaattataaaggatttaagtcattccaaatatcactgccactttttatttagaatattctaaagaattctctctctgtgtacacacacacatatgcgtactcttaatccaagtagcttggtaggattttatttacctagtgcctagatgggaaattgcctggggattccaaatacctatttcattaaattaaagatgtcactgattttaagacttaacactatttttcatactgccaagaaagaaaacactaccagttataaatgtaaattgccatcaattgtaatacatcaattttagagctattattaataaaatgtgaatgtgcatcttagagcaatgaaatatagtactatatatttgatgaccttttctgccctgtgatattcagaaagtgaaagttaaatatgggctgagcatggtggctcacacctgtaatcccagtactttgggaagtcaagacgggaggctggcttgaacccaggagttcaagaccagcctaggcaatgtagcgagacgccatctcaaaatattaaaaataagtaaataagtaaataaaaagaaggttaagtatacaaatgtatttcctttgttgtgaatttatttcaattttatagtgattttttttttttgagacgaagtctcactcttgtcccccaggctggagtgcgatggcgtgatctcagctcactgcaacctctgcctcccaggttcaagctatactcctgccttggccccccgagtagctgggattacaggcgcctgctaccatgcctggctaatttttgtatttttagttgagatggggtttcaccatgttggccaggctggtctagaactcttgacctctggtgatccacccgcctcggactcccaaaatgctgggattacaggcgtgagccaccgtgcctggccagtggttttttgttgttgttgttgttgttgttttgtttttgtttttgtttttgttttgagacaggatcttgctctgtcacccaggctggagtgcagtggtgccatcttggttcactgcaacctctgcgtgggctcaagcaatcctcccacctccctttccagagtagcggggaccacaggtgtgtgccaccacacctgactaatttttgcatttttttttgtagaaacagggttttgccatgttgcccaggttggtctgaaactcctgagctcaaacaatccaactgccttggcttccctaagtgaaattacaggcatgggccactgtacccagtctagtgatttttttatttttatttttattttattttattttatttttttaccaaaaaaacaacaaagcctcaggaggaaaagttgatacacaagtaaattttattggaaatgtttttgtgtggaccttaagcagagggaaaattagtctgcattatggtgtatccagactaaatgactgatattaaaatgaaattattcttaggatttgcaatcttagagaaaactttttcatttttatttttttgagttacaaattatcttcatttacatttgagaacagtgagtcacagagggattaagtaacttactcaagatcatacaagtctttgatttgaacccaatcttttaactctgcagaactcagagtcactcttatttggaaaaactttttaactgatgtggatcctctaatatgggcttcctattattcattctctattagtcagaagttttgcaagcagacagaattcattttgccaattacgggattttccctcagttgcagtcaaggttcataaaactataactctttatctttaattagaaatgtttttttttttgagacaaggtcttgctctgttgcccagactggaatgcagtggcatagtggcccattgcagctttgaactcctgggctcaagggatcctctgcctcagcctcccaagtatctgagactacaagtgcgtgccatcacccatggctattttaaaaaaaaaaaaaattgtagagatagggtcttgctgtgttgcccaggctggtctcaaactcctggtctcaagcaatccttctgccttggtctcccaaagtgctgagattacaggtgtcagccgttgcacctggccaaaacgataacttaaaatacacacacacacacacacacacaaacacatatgtgtatttgtgtgtgtgtgtgtgtgtgtgtgtctcaaaaggtatcaaaagagaatagctataactttagtgttgatcttgatagtgacttgattaggctctgtttaacatcaaagatgcaaattaatactttctttgaacatattaaaaatgcagaaaatattggagtattttattttaaataaattgtattctgtatatttaaggtatacaacatgatgttatgggatacatataggtggttaaaagattactgcagtgaagcaaattaacgtatccctcaactcacatagttacccattttttttttgttttggtggcaagaggagcttaaaatctcatttagtgtgaatcccaaatacagcacaattttattacctatatacttcatgttgtacattatatttctagacttgttcatcctacatatctgctactttgtatcctctgagctacatctccccattttctcacttgccccccaagtagtttcttaaagtgtctcatgtaagagggcagtagctttcagcttaaactttttctctgtatgtagtcgatttctttgaggtatacttttctctccagaatagttagatgtaggtataccactttgatgttgacactagtttacctagaacttatcttctgtaaatctgtctctatttccatctctgtctccatctttgtctctatctctatctgtctatctctatctatctatctatctatctatctatctatctatctatctatctatctatctaaagcaaattcatgcccttctcctatttattgaatcgagaccatagacaggggtgagagaaagaatttggcaggaatggggatgtgtattatctgtggcataaggaaactttacagaactaggttcaaaagtatactttctagttctttcccatggcttttcactttgatgtagtccttatcaggtaactgaggttttatataagtcccctgattcttagaacatgaaggtgtagtagtcaaggttggtcccttgaaaccacaaattttgtgaaaaaaaattaagaaaattgaataatttcctcagcaaatacatattgatcatctgttatacagccatgagaagtggttctgttgcacacgtttattttatcagatcctaatcccaaaccaggcataaaatggaaaccatgaagataggatgaaataacttctgaatgtttgaatgtttgaaaatagtgtacttaaaaataccaggtggtttttgtttgttttttgtttttttctttttttgagacagggtctcactctgtcacccaggctggagtgtagtggtgcaatctcatctcattgcagtcttgacctcccaggctcaggttatctcccacctcagcctcccaagtagctgggactacaggcacatgccaccacgcccagctaattttttgtattttttgtagagacggggtttcaccctgttgcccaggctggtctagaactcctgggcttaagcgatcctcccacctcagcctcccaaagtgctaggattacaggcatgagccaccatgcctggcagaaaataccaggtttttaagtatcagcacttactcttcaatcttttctattactatgttgtgctaaatggtattttttatttaattagagcaatgctgttcaatagaactttctttgaggatggaaatcttttatgtttctgctatgtggtacagagccactagtgacatgtggcttttgagcgcttgacacatcttgtgcaacacaggaactgaatttttaagtaatttatattgccacatgtggctaccgtatgggacagtgtagtactagatgatctgtaagggctgtgcttcatcagtgtcgttttttaactgacaaaaacctttagttttttttttagtaatgtgtttatttaaaagaattcataaaatacaagtaaacaaattaacttgttacctgagcatatgtcctttcatacttattttttctgcatacatattttggaaaatggaatatctgccctttttttttatctgagatacagtctacctctaaaaatacatgattctaacattctcacttttgttggcatttgatcagggtatagaaaaacagttaaaaggacagagaatggttgagagattatgatatgaagagaaaatgtgattgagtgtggtagacttggggcctgcttgaatgttgagagaatgactgttttccgataaaaaaaaaaagtccattctaggatcctaaaagaagggtctgaagttcactgcagaaagcaagctacatagtactaagccactaaggggacatggagcccttagtaattcctaccttagtaatagtctcatcatgccctcttgggaacccagccttgttgattagcctctctgctttctctccttatagttcaacctccctgtttgttccaagcagttcttttcctgcccatttattatgcatttctatacagctttcctcctctttttctataccatgctgcagttcttattgctacctagaggttttcaaaattcctaggggcggataagtaggcataaacaaagttcttccctattatccttcctattttttcacctagactgaagaggtagacaaaatagaaataaagacattaagggtatgtgtttgtagtcccaaagagcttctctggcaattttatgtagttgacagtgacgctctgagttcaggacagattggactccttggctgagaggagtgaggagataggacggtagaggagagggtagagcaactctggaggaagctttcccctcacctttgccagtcctgttatcctagacttaaccataattaaagatgagggaggcactcagtaaagggatctagtgggaagcttgttccagacagccaaggagggaggttcgcgcagttcctttggccacccaggtggggtaattgatccatgtatgccattcatgtacaatgtaggcacttatacctgtattccaatgtagtgaactataccattactcttaaattaatattctttattagcttccatggtggctataggccaggcaagagagttaagaaaaaataaatagccaggtatggtgactcaagcctgtaatctcggcactttaggaggccgaggcaggaggatcgcttgagtccaggagttcaagaccagcctgagcaaaatagtgagatcctgtctctattttttaaaaaagccttggggcaaacaggagtatggaggtttggatgctaatagaacagcagtgtcttactgcttggagttctcttgtttcttgtcctatcaccgtagcctttggatcacagcaatttttccatgactccatacttttcagttcttgaatattttttcctttattcctcttgtctctgtaaagacatcaactggagttggactgtaataccaggtatctccagaagatggcactatttaacagattttataaataatttgatgtgagtcactgtcatctgaagcttgttgccttttctttctttcttctttcttttttttccccatcaattctgtatgtttgaaatgctgggttttaagttagttagaataagggatgtctgtaatttccctaaattgagaagtaatatgcaaaggttgatatcagaagtcatatgctcaccttgcaacaccaaataatactggcccatttgtgatttttgaaagtaacactccataataaatggatgtatatatagaagcataacaaaaatagaagcacataaaagtgaaaagtctcataaacgccattgtcactactcatgtaattgctgttacaaatttgtttaaatgttgaataaaaatggtgtcataggcaacacagtgttccactacttggtgtttttaatagcattattctgtctcagtgtgctttggattatcaggtgctttttaatagttgcatggtattacattgtgtagatgaacttgattaatttaaatggttccctgttaatggacatgttggtttgtttttgtgaacaactgatacagtgaacatttattttttaaataaaaaaaagagagacagggtcttgctgtgtttctcgggctggccttgaactcctggggtcaagcgatcgtcttgcctctgcctccctgggattacaggcatgaagccaccgcacccggcccagtgaacactcttgaatgtatctttgtatacttgtcagtgtttttgtagcattgattcccagaagtgggattactggattaagtgacatgcatgtttgcaattttaacaggtattgctatgtcattttcaaaagaagctatgccaattaatactctcaccaacaagagtgcttatttcccctcagcatattatcaggcttaagttttgccagtatgggtgggagaacagtagaatcacattgttttagtgtttgtttctcagatagatataattttacaccttataaccttctcttctataaattgtctatttgtgttcattctccattttcctatgggttcttattgttggagcccaatatataaaagggggtatttgttacagaacctcttcagttttggttcatgtcatgcctgggtttttaccctttctacggatgttaaaaaaaattctctattttcttccagtccacttatggctttattttttacatttagattttaatccgtctggaatttatttttgtgtatgctgtgaggtagggaccatacttttattttttcccaaatgggttactagttggccaaacatcatttattgaataattcatcttttccctactgactcgaaataccatctttattgtatactaaatcctcatatagttctgggtctgtttctgggctctactttgttcatttactgtgctggtactgcaccgttgtaattgctgtggctttgtggtatggtatggcttgctctctgctagggcaagtcgaagctcttttgttcacctgctctttcacccaaattttctgtcctgaatccagcacagccaaattatggtcattgtcaccaccaactacagtgggtgttgagcatttcccattgaatctcctgtaagggttttattggattctgtgatagcagtaaaatgggagcctaagaggtattccttaaaggactactaatcagacctggtttcccagatgatgctgaagatgacggggcctgggctagacttttgagggacatatccttggggttgggtgtgatatagaccagcccttacaatttgcttgactcatgggaatcgtacagggccagaaccagacacctgtcatgctaataacttccctcacaattcagaaatcactgtgattgaagatgggtggctgttataatactacccacttaaaaatggatgtaacccattttttaggactcttaaaaacatcaaatcagtaatggccgattaggactttttaatttttactaatctctacttgaaagttttctagtcattcatttcaggaaacctaattcttataattcatatcatttagaatatcataatgctatggatattagctagctaacttctcaaatcttctagttctcatttaatttgaagtttgtgtgtgtacataaggatatacatatacatatgtgtgtgtagatatatatatatatagttttttttttttttaactagaatgaccagtcaacaggggacataaaagtaattggtggagatgatctctcaactttaactggaaaggtatgtatcttgaaagggaagaaaaaaaagcacttcataccgagtcaattagtaacagtgtgctttcaatcaatcactaagagataatttacatagtataactaaatgggttatttaacccttggaagcagtctaggttaattatcgttccctaggtcatgtagtaaaaagacagtagaatccaacattaaccttaaatgtccatattgtcaagtactgctgtctgcctctgtgggactctaatttgggatccttcaaaaaacattgatgggggaaaagatagcctttaaaaaaaaaaaaaaaacaaacctatgtgagtctatgtgaggtagactcacatagtttcctaaaagatagcaaagcagtattatgtagtggctgaaagtgtgagttccggagcctgacaactgattcaaagcatggcttagtacttcctaactctgaccttgggcaagttacttaacctctctgtgtcccatatgtgattagggtgaggttgataatagcagccatagagttaagaggattaagtgctataatgcaagtagagctcttacaacagtttctggtaaatcactcaataaattcagacatactattattttaagaaatctcaaagagttttcttgtaccttaaaattctcctagtgtgaaccattggttttggtatattgtgcttccatgtagtttaatatcaagatgtttttagatttcccttttaatttatttgttgacccattggttgttcaggagcatgctgtttacctgaaaataatggagatattaaggtatttgaatatttatcttctagtacattgaaaaactttttgagagtaaccaataataaatgatggaatgctactgctttttttttttgaagctgccagttattgtttacttacactatgccaaatataaaggcattaatctcataaaagtttcacaacaatcctgtgagggagacgatatccccattttacaaatcaggaaattaagacttaataaggttaaaagacttgcccaaagtcacagaaccagtaagtggtagagcttgaatttgaatacagacctgactctaaagctcttttctttctttagattttagtgttcattgcttacttgaatgagtatctataagaaaactttaacatgtaaaacttctgtgaaattatcttgtcccatatcagggtcatgtcaaactaatgtcctcctcagcatctttggaaaacttcagaggagaaatgagctttgcccctcctgttcatttcatataccactgttagacctgtccttccctttcagcatgctttgtccatatttagaagctgttgaagccattacttgtctggtcagtttttagtgctggaatggacctagccttttaggccttctgagatttagtttgatctcgtctttcccacctaatggctctgttctactacatagatttgatctgaaacagttctctgtttctaaaataactttcttttcatgatagtcacagtaaagtacatttattatggaaaaatcaataagtataacgagtgaaagttatttcttggtggtaagattatgggattatttgaactttctgtttcattgtattttatttatttatttatttttgtgatggagtctcactctgctgcccaggctggagtgcagtagtacgatcttggctcactgcaacctccccttcccagttcaagtgattctcctgcctcagactcccaagtagctgggattacaggcgcacgccaccatgcctggctaatttttttatctttagtagagacagggtttcaccatgttgaccaggctgatctccaactcctgatctcaggtatccacctgcctcagcctcccaaagtaccgggattacgggtgtgagccaccctgcctggcctcattttgtcttttgggggtatttttgtgtgcagatatatatgtatataaatatttttccctcttttccccagttagtatttgagcagatgaactttggacccgaatacctgtattcaagtctctaataccacttcttggctattttcattttatcaaatggcctcttatcctcgtttttctcatttattaagtagagatgtaactacttgatataattcaaaaactcaataatggcattcttttgttttttagactctagtgtctgtactcgttgtaccatgctgggattcatttgaacaattgcatggcttttttagtgtattattaaatttgcagtttacttagaatttactgggacctcatacaaatgggaaaaaaacataactgtgttactcatttgctgtgtgcctttggattgaccctattttttgtattcattttctccccatgtcctgagttccactttgaataaaaagtaatttttttcctgcctgtaaaataggctaccaataggctgcagttgtctatagtagctgcttcactgaggagagctcagcatgagagaaatagtatgaattgcttgccacaagttatgggctagccttacttcattctgtacttggacctgtttaggcttctaagagatcttacctccaacaataaactgctttgagacatgaaaaggtggaagctttacttggttataactttacttttaatacctagaacagtgagtcttcaaacttgtatttgcatgcccaatttataaaaagtttcctgagcatttacccctaatatatgcattttaaattatatatgatttatggtaataataatatatatgttacaaaatacatacaaaaatatagattaaacaaggtgaggtaaaaaatttaaaagttctaatctttcttgcaaaccagtggatcttttgtgccttactctggtaaacactgtcttagaagaatatatagaacattaaaatcttaatgctatagttatatgacagagtatgatgagagctacagataaacaacacatcatgaatcttcttgtggcagtgtttataaccattatgtgaaatgctgcctcattcttataactagcataagaacagataggactttctcgattttgaggggtaattattagatggtattttctgttaaggactcttccagctataaaattcttaaatgtagaaagcgaagtgagggtttatggtgagaggaagcattggtatcatgttttagtgtagtccaagaatatggacacatccagaaaatgcagatcaagtttagcctaatgagaaaatatattttggagtccatatggtaaattaaattatgtgatttttgagttattgtacaaatataattcttagaatgttagagtcaggagactataagagaccaactgcttcaagtttcatttaacacatgggaaactaaggccagagaaatttcaagacttgcccaagattagacctcttgttaagtaatgaaagtgttttaaaaacaggtgggtcaaattctgtttttaaaatttccattatgatgaaaatttcagtattacaggcttccaaatcccagcagatgggccacttgtttaaaggagagtttgatataataaagcatctaaaaacaagagtttggataattccttagggttgttatgatgtgatttgacttataattggaaataccgttttattcattgtactgattttcatttctctttttcttctagaatgtcttgattgtggaagtaagttcacatttacttttaatataacatttatgacttttctaacttagtatgcaccatcctaaaggtaagccagggagagaaattcctctgcatcagttttaatggtgggcttgtgttctaaaggagtgagattggttttttgtaaagactacttagtaatttgtttttaccaataatggaatggtatacttcctacctctctttttttagtttgaagtattttctttctaaacataactctctctctctatttatctatatataatatatacatatatatcttatattttatgtatatatatatatatcttgcttagattttgtcttatgtaatatttggtacataaaaaataatatttataatttatagactattttccatgtgttattatgtgctaaagtattttgtatcttagcaccgagaggctaagcagtttcctagggttaccagctagtaaactaagggaaacctttacttcctttagctcagtggttctcaaaatgtggttccctagaccaaaagtattaatatcagacaagaacctaccgaatcaaaatatctgtgatgaggcccagcaagctatgctttaacaagtttccgagtgattctgatgcatgctaaggtttaggatcccttgtttttactcataagtcactttctcattaaggccttccctggccatcctatataaaatctcatgttttcacaccgtcaacttcgtattcctcctcaatacttttattttcctgatcacttatcactaacagcctctctctctctctctctctctctctatgtatatatatatatatatcacttatcactgtctaacagcctctctttatatatatataatctatagattatatatatatgcagcattgtgcaatcattatcacgctcaattttaaaacattttcattgccccacaaagaaacccaatccccttagccatcactccccatttccccttcccccagcacctagcaaactgatcatctacctacttgctgtctataagatttgcctattctggacattttgtataaatagaatcatacaatatgtggccttttgtatctggcttctctcacttaatgttttcaaggttcattcatgttgtggagtatatctgcactcatttcctttttattgccaaattgtatggatagacaggtgttcctcaactgtgtcctgataaacccatctgaagttgaaaatatcataagttgaaaatggatttactactttgataaatctatcctaaagtcagaaaaatctcatgttgaaccatcgtaagttggataccatctgaattacatttttgttatccattcactggttgacagacgttaggttgtttccactgtttgctccttatttctcgtacctgaaatgtccttattccctcccttcttatcccatgtttaagtcatttaagacccagctcaaacgtcacctccacaaaaccttccttgatacccctttcctcttcaattcacttggaccttttgcatttaattttaatttttattttttttaagacagagtctcactctgtcaccaggctggagtgcagtggtatgatctcagctcactaactactctgcctcccaggttcaagcaattctcatgtctcagcctcccaagtagctgggactacaggtgtgcgccaccatgcctggctaattgtgtgtgtgtgtgtgtgtatgtatgtatgtatatatgtgtgtgtgtgtatatatatatatacacacacatatataaatatatatacatatatatatatacacacatatataaatatatatacatatatatatatacacacacacacacatatatatatatatagttttttttttttttaagtagagatggggttttgccatgttggccaggctggtctggcctcaagccatcctcccacctcggcctcgcaaagtgctggtattataggcatgagccactgtgcctggcctgcatttcattttaattataaaatattttgaactcagaaaaaagggtatgctgaatacctacgtacccacaaaagtattaacattttgccatatttgcttctgatcttattttttttgagaaattaaagatcataatacaactaaagccccatttctttcccttcattcccagaagtatgacaattatccttaaagttgatatatatcattcccatgcatgttttttatacttccctagtacaagttagctgtatcctctgctcaggggctcatcaagctgaatcaagggactcatgatcctcttcaaagttccttcaggttgttggcagaatttagttccttgtgattgtaggactgagggcccgttttctcactggctgctggccaggggttgctcccagatatttaaaggctcatgccctagcccatgacagtctcacaacatggcagctgacttcttcaaaaccagcaggagaatcttgctctagtctaccacataacctaatcacaggagcggctatcccgttattttcacagatcctggtcacattcaaggggagggaacccttctgtgtgtgtacaccaggaggcaggaattttttttttctttttcttttttgttaaaaagtcttaaagtcttttatccctaaaggaggcaggaattttgagagccatcagaattctgcctaccacagcccagaaatctgcatttttcacaagtctccagccatgatgtttctgatggctcacactgctttattccatttttaaagagtatttttattgaaaagcattagggttatggtttaaaaaatattttccctaacaaagatgggtttgtttagagtcctacttttgactaaatagctgagattcacttttatgtaaagtcattttatagcgttattaatttgggtgcctttaaaaatagtataaagcatgtttctcgagtgtagtctgttagccacctatattggagagttgggaggagagagtctctatcttgaatttatgggaaaaattctaaaatactttttataatgaaggacaacatcataactccctaataaaatgtgcatgtatatattcaaatttgctgtcattgatcctgcacctacaaaatccagtcctgggggctggcattcttactgcttgctgagggccagatgatatagattccagaatatctccatgtagattttggtgagaattactgtgctgaaaagaatgacagtattgcagttatacatgggggttttggtactttatattgtgactctgaatttaaagctatgcaatgtcttcttttttgaaaggatataattgacactggcaaaacaatgcagactttgctttccttggtcaggcagtataatccaaagatggtcaaggtcgcaaggtatgtatgacattttgacacagaatattttcctcatttgaagggggattaagtgattgcttctttttaaggataaatgttttcaactgtcattttatcttcgaaaagtaatgtaatctcatataagacttaagatataatccttttaaataattttgtcatgtgttaataaagctcataattacagtcacttccttgcctaatattaacatttggtttttcagcatgctaattatatcagtttgtcctgaatagcatggcagaggattttgggcccccttgcaaaattaagaataaggattccaaagcgggtgaggaagtgataggaaggggtgggccctgaagatctggacctcctggaattgagtgatgaatgctgcatcttctttgtgtctgtagtgaaattttataatgcctgcttccttttttattaagtcggcctcacctcctcaccttacctatgctgttttacttttgcttttatagttctacctgtgtttatttctcattttcgtttcatctctcaacaactctggggtggcattattattcccacttttcagataaggttactgaggcatagggaattgtccaaaggtacagagctagtccgctatagagatgagatttgaacccagggaacctggctcacagtttatgcttttgctaccttaagtttttaatagagtgacatcaaacaaacatttaagaatatgtttttcttttccttttataatttcattaaaaacattaagtctctgatcagtctgcagtttttatgtaggggtcaggtaatgttctaacttctgctttttcctaagtgattaacaggtttttataagcccttttgaaaaaatcacggtatctgtcgagcatctttgaatcagagtaagccttctagtgagtcatatgtcagcagtttgactgtatgggcttttctaatatccagttcaagtgtttatcagtgagtttttcttttaaatagatttgggacaggtactatgagagtatataagtgatacgttataggacactaactagtatcctatgaaatggcaaaaactgcaatcacttttgcaccaaccaaatagaaactaatcagtgcacttgcttatttttctacatgctctttagggttttaaatgtcaacctactgtggcatagactttaatcctctgggtattcttttgttgttctttcctggtatatgctgtggaattgagatagactggttcgtgagcgagagattttgtgttgccacaggtaggacatgctcaaacaatacttgggtcatttcttgacccaagtcatctattcaccatagttttgtagcaccgatcttgcatacatttcatgtatcttctttgaaccccacgtcagtgctgcttatatgatactcagaaattaaacactaaggaataagattttcaggtaggattgagttttggagggtcacaaatcttgtaatgtctaatatttccactctccctgctgagaattagttttggcttccttggaggtgatatcgcctctgttgagtataagtggcctactgtgatcacaccactgcactccagcctgggtgacagagtgagaccctgtctcagaaaaaaaaaaaaaaaaaaagaatgcatggcctagatgacttctaaggtttttcccacccagttccagttttcatgttctaggcagagcagtaaagtgagaaacacatggacttgggagtttagtctcgcatttcactgccacttaatctgagcgactattccatatttaatctctctgaatgtatttactcatctttaaaggggaatgattattaacatctttttctcagggaaactatatgagtcaaggagataatatatttgaaaatctttttaactgcaaagcgctgtttcactgttggttataatgtgattgatctcattgtagtgagcagctgcttaattgcgttttagaatgtagggaagatagtaatatttttcacattatatatgtagctggttctggaactgtaaacatactccttttttatggagatctgagtcacgtaccataaaattcactcttttaaagttgtacaatccagtggtttttgatatattcagagttgtgcatctgctaccactatttcattttggaacccaaagaaaccttgtacccattagcagtcattctcccttctcccagcccctggcaactactaatctactttctacagaaagtccgtacagatttgtgtattatggacattccatataaatggactcatgcaatatcctgtcttctttcacttagcatagtgttttcaaggttcatctaggttggggcatgtatcagtacttcatcccttgttttggctgaataatatttcattgtacaaatatatcacattttgcttatccatctgttggtgaacatttgagtttctacctgttggcttttatgaataatgttgatttgaatgtttgtgtacaagtatgaatacctgttttcaggtctcttgagtatatagttgctaggtcatatagtaactctgtgtttaacattttgaggaattgcccgactatttaacaaggtatatgtactgttttacaccagtaacatatgagggttccaatatctccacatccttgacaacacttgttactgtcctttttattgtagccatcctagtggctatgatgtggtatctcattgtggttttgatttgtgtttctctgatgctgatgatgttgaacatgttttcatctgcttattggccatttacatatatcttcttaagaacggttacccatttacagtatggaaaatgcttcagatgcaactctagtcatgccttagagatggagctttattaaacattcagatctctaggcatatgaagtgctgagttctcttgaactcctaatacagattgcactgagtttagtgataccttttctggagcattcctgagttcaggtagggagaagggtttttgctgtgattggcttgttatgttctttctaaatggaaatagaattgaagtgtctcctctctccatttattggaagagtcatgagggacataattagatgatcccttggagtctccggcttaggtcagtggttatctacttaggctgcacattggaatcacctgagagttaaaaaaccaggataacctctgcctgtgtctcatctccagcaattctgatgtaattggtcagggctgtggcccgagtaggtgagttctggttttttaaagctcccaggtgattctgatgtgcaatccaggttgagatcactttgggccctttccagctctttaaacatatatatttatctaggaaggtatgaaagcataagttttcttgagactgcctttaacatctgtaaaggctttcaaagcagcttctgtagttttttttaaatggctgaatatttttcaacaggcagcatttgggttataaaattagcttttggtagagttgacttataccacctccagcttttgttccaaaaataaatactggttcttttggcacactagttgttttaccctaaagttcctctttgtaagccagttattaaaagttgtgatgcagccagggcgaagtggtacacatctgtagtcccagctactcggaaggctgaggggggaggatcgctagagcccaagaagtcaaggctgcagtgaactgtgattacaccactgcactgcagcctgggccacagagcgagactcatctctttaaaaaaaagaatgttgtgaggccgggcgcagtggctcacgcctgtgatcccagcactttgggaggccgaggtggacggatcacctgaggttgggagttcgagaccagcctgaccaacatggagaaaccctgtctctactaaaaaaaatacaaaattagccgggcgtggtggcacatgcctgtagtcccagctactcggcaggctgaggcaggagaatcgcttgaacctgggaggcagaggttgtggtgagttgggcgagccattgcactccagcctgggcaacaagagcaaaactccatctcaaaaaaaagaaaagaaaagaaaagaatgttgtggccaggcgcggtggcttacgcctgtaatttcagcactttgggagaccgaggtgggcggatcacgaggtcaggagatcaagaccatcctggctaacacagtaaaaccccatctctactaaatacaaaaaaaaattagccgggagtgctggcgggtgcctgtagtcccagctactcaggaggctgaggcgggagaatggcgtgaacccaggaggcagagcttgcagtgagcggagatcgcgccactgcactccagcctgggcaacagagcgagattccgtctaaaaaaaaaaaaaaagaatgttgtgataaaaggtgatgctcacctctcccacacccttttatagtttagggattgtatttccaaggtttctagactgagagcccttttcatctttgctcattgacactctgtacccattaatcctccttattagctccccttcaatggacacatgggtagtcagggtgcaggtctcagaactgtccttcaggttccaggtgatcaaccaagtgccttgtctgtagtgtcaactcattgctgccccttcctagtaatccccataatttagctctccatttcatagtctttccttgggtgtgttaaaagtgaccatggtacactcagcacggatgaaatgaaacagtgtttagaaacgtcagtcttctcttttgtaatgccctgtagtctctctgtatgttatatgtcacattttgtaattaacagcttgctggtgaaaaggaccccacgaagtgttggatataagccagactgtaagtgaattactttttttgtcaatcatttaaccatctttaacctaaaagagttttatgtgaaatggcttataattgcttagagaatatttgtagagaggcacatttgccagtattagatttaaaagtgatgttttctttatctaaatgatgaattatgattctttttagttgttggatttgaaattccagacaagtttgttgtaggatatgcccttgactataatgaatacttcagggatttgaatgtaagtaattgcttctttttctcactcatttttcaaaacacgcataaaaatttaggaaagagaattgttttctccttccagcacctcataatttgaacagactgatggttcccattagtcacataaagctgtagtctagtacagacgtccttagaactggaacctggccaggctagggtgacacttcttgttggctgaaatagttgaacagctttaatatacaataattgttgcattattatttcagatgataaatgtggtcataagtaagaaataaatgatcgagtttagtcttttaattcactgtcctttgaatacctgcctcttactctggaggcagaagtcccatggatgtgtttatgaacatggttgaggaagatttaggaagactgcaacagtacactacctaaagcaggttttttactccatctttttttgccacgtacactggcctcccactttgatatgcttgaaattatctccttgatttgtctttcaaaactacatattgaggctggttgcggtggctcacacctgtaatcctagcactttgggaggccaagccggacagatcacttgaggtcaggagttcgagaccagcctggcaaacatgatgaaaccccacctttactaaaaatacaaaaattagccaggcgtagtggtgtgtgcctgtaacccagctacctgggaggctgaggcaggagaatcactggaacccgggaggcagaggctacagtgagccaacatcacgccactgcactccagcctgggtgacagagcaagactctgtctcaaaacaaaacaaaaaacaaaaaactacgtattaagacaagaaacagactgggcgcggtggctcacgcctgtaatcccagcactttgggaggctgaggcgggcggatcacaaggtcaggagatcgagaccatcctggctaacacggtgaaaccccgtctctactaaaaaatagaaaaaattagctggggtggtggcgggcgcctatagtctcagctactcgggaggctgaggcaggagaatggcgtgaacccgggaggcagagcttgcagtgagcagagatcgtgccactgcactccagtctgggtgacagagcaagactccgtctcaaaaaaaaaaacaaaaacaagaaacaaattaaactaatgtgatagactactgctttgttttcaaaagatacactccccaaaagttactgatctaaaatacagtagtactatctctgtttagtaagaaccctgacaactaatagtgttcttatatgtaaaatgctattcttgcctttcatttcagaatatactttttaaatgtgaatttctggatttttttttatagcatgtttgtgtcattagtgaaactggaaaagcaaaatacaaagcctaagatgagagttcaagttgagtttggaaacatctggagtcctattgacatcgccagtaaaattatcaatgttctagttctgtggccatctgcttagtagagctttttgcatgtatcttctaagaattttatctgttttgtactttagaaatgtcagttgctgcattcctaaactgtttatttgcactatgagcctatagactatcagttccctttgggcggattgttgtttaacttgtaaatgaaaaaattctcttaaaccacagcactattgagtgaaacattgaactcatatctgtaagaaataaagagaagatatattagttttttaattggtattttaatttttatatatgcaggaaagaatagaagtgattgaatattgttaattataccaccgtgtgttagaaaagtaagaagcagtcaattttcacatcaaagacagcatctaagaagttttgttctgtcctggaattattttagtagtgtttcagtaatgttgactgtattttccaacttgttcaaattattaccagtgaatctttgtcagcagttcccttttaaatgcaaatcaataaattcccaaaaatttaactgctttatgaattcaatttaaaaatccttaaaataagtcctgtctctttaaaaaaacctatgcatagttatcatttctctacaaattaacctagtttagttttctgttggttccattttccttgtttgttaagttttagtagctagtttaattgtaatctcaatgattatgtggtagaatgggttggcggagctacaaaaattcctagctacttcagagacattaaatttcagacacatggtacactttatattacattttactatgctaaaataacacggctttcttttggaattctgttcagtttttcagattgtaatctcagctacatctcaacagattgttctcagatatgtcctattaccttctttgtgtagatagtgctttattgactaagaacaatgacaacaacaccttttgttttctgggaataggagaaaagttttaagccaaaactcttaattgcttatctgctccacgtgaggtatgaactatcaaacttaggagccatctagcttacacgtgttccttaaaaagtttgctgtaggccgggcacagtggctcgtacctgtagtcccagcacttttgggagcccagggtgggggatcacttgagctcaggagttcaagaccagcctgggcaacatggcaaaacgccatctctacaaaaatacaaaaaaaaaaaaaaacgctgggtgtggtggcgcacaactgtagtcccagctacttgggaggctgaggtgggaggattgcttgagcttgggaggtgaaggctgcagtgagccttgacagtgccactacactccagcctggatgacagagtgagaccctgtctcaaaaaaaagagtttgctgtaattcccagcaacaaagtaggagactcaaactaaataattttctatagtcctagaacttcttagtttacaaaacatttttacttctgttatctcatttgatcttcatacccatgtaaggttgaggtagatgttaccacatgtgagtgcaatatccagaactcctgaatccccttcttcccctaaaatgtcagcccgctgaggtccacttggctaccctcttgaatactgcatccagcttcccactgctgaacctctttactctttttttttcagttgcacttaccaccttctagtaagttgaaccatatgaaattaccatttttgcaggtaaaaaatggccggtgataggcagtttggcgtcgtataacccaataacatgttatataatttacccacaagtggtgggttgctatgtcctggaggagtcagcttcagactctagctaaatgattgtataaccttgcagctctcccctaagtgaggaggcaatgttgaaagtcccatgtcttatcagaaccagggaggcagatgagaaactgccttatggcagctcccacaacatagggaggtgggtgacaaatggccttgggacagcttcttcccaagactggttatgttacagtgttcctgggaggatcacatggcattcctccaagatgggtcagactgctgttggccttgtctgtgtggcgtatgtgaagacattcatggcagagctgttcccttagaagcatctactaaattgatcttttcctttcttacttactgtctgtctcccttagtaggctgtcagctccgtgagtgcaggaccttgccagtcctggtcactgctatatccccagcacctacaagagtgcctggaaaattgtagtgctcaataaatatttgttggataaatgatagaatgataggaagttaaaaagcaattaaaatacttgaaaagaagcaaaacatttttcatgttaagcaaaaaaaaaaaaaaaacttattaaggatagctaacatgtattgaattctatatgcaatggaatgatacttagcgcctttgaatccttatgataaccctataaggtaggttgtttgggtttttttaattgtcccaactttacagatgaagaagtgcaggtccagagaggtcacataatttgcccaggatcacacagctagtaagtagcagatgaggaatttgaacccaggcagttgtattccaccatctgccctcttagttcattgccacttaacctataatgcccagctcttgtgtagaaattaatacactgataacatagaggaaaacattaagctcattgaatgtaataagtccagatgacttgtacattaaacacagctttttgaggtcacagctgatctctaagaatgtaaactgatttcctctggcactaaaaagcattttcaaagactgttaagagagtttctccaacattctcttcagatttttctgctggcttattttatgattctgtggacagcttcagacaaaataactttctggtatgaaggattgtgtttactctgcttttttttttgttgttttttgggttttttgttttgttttgttttgtttttgagacagtgccttgctctgctgctgcccaggctgagtgcaatggcatgatctcggctcactgcaacctctgcctccctgggctcaggccaggtgtatgctaccactctcagctaatttttaatttatttttttagagatacggtcccactctgtttcccaggctggtctcagaactcctgggctcagacagtcccccgccatggcctcccacagtgctgggattacaggcatcagccaccatgctcagcttgttctgccattttcaaatgtgaattttatagacactttaaaccacttgaaagagtgatgatgttttaatgattttcattattatttgcaacttcaagcattaaacactgccaaattaagtttcaagttttctctttacacaatatggatgtacttcataatggacttcctcatcatgattaatgagtgaagtgacattcaaacttggtagcttttcagtagaacttcctttcccaacattttttctgttcctttaattatggcaatatctgagagctctgaacataagtcaaaggtttgattatttttcatgtggcttcctctgcttggaactttctgccccgcatcttcccgttgccccctgtgtcctcttgtcatgcccctacccttttttgagtgtgtctattttctggcactacaagacataacaggctcatcttgtgttttccctaccctgacccagaatcagccattacttcaaggagccctggttccattattggagaatactattagaaaccaggatctggtgctaggcatgctcatttctattggagtgtcatacaaacaatttgtaaattgtttgtaggtcctcccagtggataggattaggaaataaaacatgcatactaaccatgcatacacacacatctacgtctatttctgtatctgtctgtatacatattaaaataaacatgggttgataactaatgtttctgctgtaatccacagccttcatcctagcctgccactcttcttctttttagctttttcaacagtgggaaatgtggctcttgttatgtacactttattcacttatttgtttgaccctagtatcataaagtagttccgtatgcctgtaacagatcgactaactagagtccattatttgcggaaagatctttttgtccgaagcgttaccgcaggggtgtccaatcttttggcttccctgggccacactagaaaaagaagaattgtcttgggccacacgtaaaatacactaacactaacgatagctgataagctaaaaaaaaaaaatcaaaaaaatttcatgatgttttaagaaagtttactaatttgtgttgggccacgtttaaagccatcccgggtcgcaggttggacaagcttgccttacagtatccagtcaaaataatgttttccaaaattacttcttttctttttcatccctttcagtgtggccgttatttataatgcagtttggttcattagtgtttttattacaaatacaccctcagccttcatatcctagttttaatgaattattacggtgaaacataataagagtcagagctatacagaaaggtctactcagaggtgctttgttccctcctattctgttcccactactcctactttccactgaccctgtaagcatcatatttatttttaatggcagttacatttttaccaagtgcttactatctgtaggcacttggtgtgtattgcttcttttggtgttcacagcaacctcttgaggtaagcactattattatcccccctttttcttttttctttctttctttcttttttttttttttttttttgacagtcttactctgttgcccaggcaggagtgcagtggcgcaatctcggctcactgcaacctctgcctcccaggttcaagtgattctcctgcctcagcctcctgagtagctgcgagtacaggcacaagccaccacgcccggctaatttttgtatttttagtagggatgaggttttgccatgttggccagggtggtctcgaactcctgacctcaggtgatctgcccgcctcgacctcccaaagtgctgggattacaggcacgaaccactgcacccggctattatccccattttttagatgagaaagctgaatcccagagagcataagaagcttgtccagagtgacatctctgatgcataaccagtactcaaacctatttttctgacaccaaggcctgtgtgtaaactgtaaaggggctgcttggcacctactttcctaaagttgtcctatcccttctctgtctgggtcttcctgaagcttggcacttctgaagtcacctctctgaaaacattctggtaactgttaaatcccttgttctagctattcatgtgttctgtgtggttaaacaaggttcacaatgggccacctggcctttggaacttgggtgaagaggctgccttcagttgatcctccccactcccattttcaaaacatgggtttacatgagttatttgtgaattaggaaacataaccatgttttgagccttcatagaaaacaaacgtctggggtcatacaggttaaaaggagtaaccaaattcggcactatcattgttctattcagtagacaattctggggcctttctgtgtctcaggttctgtactagttgtttcaggactttgggataaatacaaactatccctgccctcagggggcttaaggtcaggtgtacaagtgactctaatgtgaggcaaggctggattcagtgctgcatatctaatgctatgggaattcaaagaggaagtgatcagaatgagaagggagggatggatcattccaggagaagcttcagggaaaagcaacatttaaaatgagacttttgagagtgagggaaatttggacaggtggatatagaggatgcaaggctagaggaaaggttttagccagaaagtctgcttgggcaaatgcctgggtaaaaaaagaaaatccactttgggaggacaaggcgggcaatcgcctgaggtcaggagttcgagaccagcctggccaacatggtgaaaccccgtctctactaaaaatacaaaaattagctgggcgtggtggtgggtgcctgtaatcccagctacttggaaggctgaggcaggagaatcacttgaacccaggaggcagaggtttcagtgagccgagattgcgccactgcactccagcctgggcaacaagagtgaaacatctaaaaaaaaaaaaaagaaaatcacagggcagtgtggggaatggtgagtattctaatttggttgtggcagagaggatgtagaaggaagtgataagagagaaagccggataggagggcctttgtgccagttaggatgttctagacttccagccaggttgcccagctcaaactggcttaaacaatgagggggtttattggctatgtaattgggaagtgcagaggtagctcaggccagatcagtttgatccactgctccattatgatgtcaaagacccatgcgatttccacctcattattctgctgtccatagagccaacttcatcctaaggccagtccttgtggtcagacaagggctgccaatagtaatctgggtgcaagtttctttgagaaaatctttctgtgtcaactctcttaaaaggggtgaaaaatctctccttaagtcccactggccagaatgggcccatgcacccatttcttaaccagtcactggcaactgggggtgggattgccgtttgcccaatcaggtccatttctggagctaagattaaactccatttcccttgggacacattgaacagaatcagaattcgatgaagaaggaagaagcggagaattggtttggtgttgggtaggcaaccaaaaataacctctgttgcctcaagtgccaagaaagtggtgttttgtgcttgttagggtaaaaatggggatcatggaaaatattttaagtttcatagaccaaaaaatattccagtgtttcatcaaatctaagaggctatcaattataagatataccattattttatgtaccaccaaggaagaaaaaatgctgccagtgaagttaggatgtattgcaggttgggttctctgggaagcaggctgaaaaggaggtgagaatgcaggacatttatgggagaacacccttgggattaatactggaggaggagaaccaagcagggttggtggggcacagggagaagttgggatgccatgcagtcacaacaaaggcctcagccaaccccacggggagctcgagaagctgagatggcccttcagtgttgccctgccttgtggtgagtgaattgggtcttcatatccccatgttgactggtcattggatgtgggctcccttaggaatgggcatctcttcagcagaggtagctttcttcaaaagaggtgattccaaagagtcacccactcactgagggctgtctgctggcagcattctcagccactactcaaagatgacctgtccaggaaggggaacctaggtggcatgacacattgtctattacaacatgctactgattataagagccgggaggtggggggcaacacaatgtctgagatattaaaatggaagtctcttagaagaaatggataattctataattatagttaatcagaaaggggaagaagtggggaaatggaccaagggcctgagagagaaaacagacgcaacaggccactagaaagataggacactggagggtgggaagccctagcagtttcttccagggtgggctgggcacggtggctcattcctgtaatcccagaactttgggaggccgaggcgggcagatcatttgaagtcaggagttggagaccagcctggccaactcctgtttcaccctgtctctgccaaaaatataaaaaattagccgggtgtggttgcatgcgcctgtaatcccagctacttgggaagctgaggcaggagaatcgcttgaacccaggaggcagaggttgcagcgaggaaaaatcgtgccactgcacttgagcctgggtgacagagtgagactgtctcaaaaaaaaaaaaagtttcttccagggtggcttctgtgccagagtcaggtgccccagctacctctaatttatggtcctcctgcactgggaaacagattttctacttttggtttcatgataaataacatttccccctgattttaaaagttatggatttggctgggcatggtggctcatgcctgtaatcctagcactttgggaggtcaaggcaggcagatcacttaaggtcaggagttccagaccagactgggcaacatggtgaaaacccgtgtctaccaaaaaaaaaaaaaaaaaaaaaattagccaagtgtggtggtacatgccagtagccctagctactcaggagactgaggtgggaggattacctgagcccaggagatcaggcctgcagtgagctgtgattgtgccattttactccagcctgggtgacagagtaagaccctgtctcaaaaataatagtaataggctgggcgcggtggctcaagcctgtaatcccaacactttgggaggccaaggcgggcgatcaattgaggtcaggaactcaagaacagccttgccaaaatggtgaaactccgtctctactaaaaatacaaaaatgagccgggtgtggtggcgcatgcctgcattcccagctactcaggaggctgaggcaggagaatcgcttgaactcgggaggcagaggttgcagtgagccgagattgcaccactgcactccagcctgggtgacagagtgagactccatcttaataataataaaataataaaaattttaaaaagttatggatctggatggagggaaatggaatgtataaaagaagtaaacatacacaagaagatacaaatacagaataaaagtaaaatgcaaccatcatcccactaccccgataccagggtatccgtttttacatcttttctttcattctttctgtctttatataattgtataaatgctgcataaacctcctcttgcctgctgcctcctcaaagacctccctccctccttcactgcccttctgctcctggagagccaccctctctccatttatccttcctatcagcttcaggttcttaccatgttaacaaaaagaaaatcttataagcctgtcactctctacatacgccgcacctcctttcattcatagcctttaaaacatatatatagcagttattgtggttatttttctgttcacaaaataaaaaaacactctttctagaaaactggaatatagaggcaagctttttttttttttcagacggagtttcgttctgtcgcccaggctggagtgcagtaacgaaattacagcttactgtaacctctgcctcctgggttcaagatattctcttgcctcagcctcctgagtagctgggattataggtgcctgccaccacacccggctaatttttgtatttttagtggaaatggggtttcgccatgttggtcaggctggtctcgaactcctgaccttgtgatctgcccatctcggccttccaaagtgctgggattacaggtgtgagccactgcaccctgccgaggcaagatttttttttttttttttaagaaaacccagttattccattacccaatgaaactctaaacatgttgatgtacatccttccaaaatttctttttatgacaacatgctttttatttttaattatttttattttattttaaggtccggggtacatgtgaaggatgtgcaggtttgttacataggtaaacgtgtgccttggtggtttgctgcacctgtcaacccatcacctacgtattaagccccacatgcattagctattgatcctgatgctctctctccctgctggctccccagcaggccccggtgtgtgttgttcccctccctgtttatgagaacactttcttgacataaagatttcatttattcccatggaattctaaaggcttttcatacttgtgaaggaataatagtttagaaataaactgaactttaaaagataccattttgaaaaataatatacagccatcaaaaattatatttatgggaactatgcaataatattaaactctatcatctgttgactgcctcctatattccagaaactttacatacaccaattctaatccttacaagaacgctgtgtaggctttagcattagatggaccaggtttcaccaactgtatggtcttggataagtacccaacctcctgtccctaagtttcctcacctgtgaaaacacggtttctaccagctttcaaataagatgatcaatataaggcacttggaacagaacctgacacatcataagcactctataaatgtctattatcaccaaataattccaggtgccttgaaaatttaaatgaaaaacaaaatcaaaccatgacaatactagaagcaaatttaggtgaacacttttctaatccgggggtgggcgggggctggggggaggcagggagaagaccttttttttttctttttgagatggagtcttgctctgtccccaagctggagtgcagaggcgtgatctcagctcactgcaacctctgcctcctggattcaagtgattctcctgcctcagcctcccgagtagctgggactatacaggtgcacaccaccacggccagctaatttttgtatttttagtagagatggggtttacaccctgttagccaggatggtctcaatttcttgacctcgtgatcccatccgcgttggccttccaaagtgctgggattaccagcatgagccaccgtgcccggctgggagaagacctttctaagcatgataccaaaggcagagacaataaaggcaaagaattgacagaattcactatccgataaaaatcacttctgtggccgggcgcggtggctcacacctgtaatcccagcactgggaagccgaggtgggcggattgcttgaggccaggagttcaagaccagcctggccaacatggcaaacctcctgtctctactaaaaatacaaaaaattagctaggcatggtggcatgcctgtagtcccagctactcaggaagctgaggcatgagaatcacttgaacctgggaggtagaggttgcagtgagccaagatcatgccactgcactccaacctgggtgacaaagtgagactctgtctcaaaaaaaataacaattaaaataaaatcacttctgaatggtggaaagcaccacaaagttagaggtcaagcaataatttggagaaaagaattagtaatttgttggacagacaaaagacttttttaatataacaaaaactttaaaaattaaaaaaatacacattcgaggacattttcctaaaaacacaggcaaaggacataaacagcaaagcaagaagacagcttgatgtggccattttatccagggggacattttggtgagccctatggacacagctgccatgatgccaacaatgtgacagctgtccccttcaaaatgcgttagccccagctcttcctctcccccaacctccagtccaaaggacttgcactttctactttactcctttctgcattgtttaattttcttttacaaatatgttacttgtcatcagaaaaaataaagaaataaataaactgttagagtgttagccccttaaaggggagcaagaatcacctttctaaaagaaagtttatgttaaatataatattagcatatgtgaatcctgagagaaaagttaacagtttagttgagttatttcctctgtagtctggagctaaaaatagggaatcttattctgtcctaaatcttttccttcctccacccagtgtctgtctggatcgaattcattcattcactcagtaggcactcactcagccaggcatggtgctaggcctcaggacctcgctgtgaaccagaaactgtccctacccccatggtgcaggcattctgcttgggagttggaggaggaacaggtaaaaaataattaaatattcaggttaacgatatattgtcaggtttgaggattgaggaaagggcgcagagagtggcaagggctgctgttttagatacagtggccaggaggcctccgatgaggtgacctttgaggagagacatgcaggagatgaggggacagtgaagaggatttctaagaacactccaggcagacagaacagcgacagccaaggccctgaagtgggtaggggcctggtgtgtgtgaggaacctcaggattgccatcatggctggagcagagacatgaagcaagaaggccatggagatgagggcagggagatcccggagtggggagatcagatggggctctgtgtatcatgcaaaggactttgcattctgttccaagagctgggaaggttgacataattaggaaaaaagcccagaaaagcagaggtatccatttttcatggtaaagatgataatttcaattaaaacacgattcctggatatatgtaatttgtaggccaaatggtgcccaatccctacctccctcaccccctcacttccctatccctaaaacctgtacctcaactcccgttcgtaagtgatgggagttaggaatagagaaatctcccggttgggttttctgagcaaagaggtaacatagcagctctgttatttctttcacgtctccaagggaaccatgactcacccttagctatcccccgggaatgtggccctcagagtgttcttttactgattcgtgattttgttatgtacacctggagtgatggaacataccataccagcttgtcagggttgctttgtgcaaagatcgatgacgtgtgtgaacccggatccatgcttggggtcctgagtttcaggtgccatggccagttgctagcaggttgtatgtgtgtgaccagcccctatgtgagtctctcagaccctgaaactccaaacaggcttccctgggcagagacattctgtccatgctctgtggcttgctgctcgagagggatagatcacatcctgtgtggcttcttcttaaatgaagaaggacattggaagcctgtgctgggcttctctggaccccccgatgtatatgtatgtatattaaagagagaccagggtctcactctgttggccaggctggtcttgaactgctagcctcaagaaatcctcccgctttggcctcccaaagtgctgggattacaggcatgagtcaccatgcctgatgtatatatttttccagctcccttcttttctgtatcatttgctattactacctcttagctattagtataaactgatcttgagttgtgtaaatctttctggtgattcactgtgatgggatgattgtgtcctctcaaaattcctatgttggagtcctgacccatggtacctcagaaagtgactgtatttgaagataggtctttaaagaggtcattgtaaattaattaataaggtcattagggtggactctaatccgatatgactggtatccttataagaaaaggaaattagcacacagacacacaatcagagggagaagacagccagtcatctacaagccgaggagacagacctcagaagaaaccaaccctgcctgcaccttgatcttggacttctagtcgccagaactgtgagaaaacaaatctcatgtttaagccagaacctagcacgtggtacttgttaaggcatccctagaaaactaatacactcactgaatgaggcaggtagctgtttcttttattttttgagacagagtctcactttgtctccaaggccagagtgcagtggagcgatcacagctcactgcagcccctgccttccaggctcaagccatcctcccacctcagcttctcaagtagctgggactacaggcatgcaccaccacgcccagctaatttttgtattttttttttttttttgtagagacggggttcaccgtgttgcctaggctggtctcaaacccctgagctcaagcaatctgccctccttggcctcccaaagtgttggatttacaggcgtgagccactgtgcctggatatggtaactttttcatatgctatttgcttgatgattatttttctgtttctgatataatgctttttattagagagttatctgtttgtttttattttttaatgtttgaatttaaaaaattagtataatttgcataattgaaaaattatatttgaataattgaaatatatttgtataaccttaaatttaaaaactatgatagcgtatacagtgaaattttcctctcatcccttttttccatttaaccagtgcacttcccaacagccaacagataattttagtttcctcactccctgagctattttatgtatatgcaagtagatatgtacatacatatttctgccttgtaacacaaatagtagcatactatacaactgctctgcttcttcctttttttagctaagaatattaaaagagtgaaaaagatgtacgctaacaaaaatcaaaagaaaactagagtgacattataagaactgatgatgtagatttcagagcaatgattactgctaggaaaaaagggtcattttacattgatcaaagaggtcaactcatcaggaagacataataatcctaaacacttatgtacttaacagagcatcaaaatacatgaagcataaatgaaagaaccgtgggagaaagtagacaaattaatgactgtagttgaagatttcagtatccctctatgaaaatcagggtagtacaagtacacagaaaattggtaaagatatatgacttgaacaacattatcaaccaaattgacctcatttacatttgtggaatgttccaactaagaacgtcagaaaacatactcttttcaagtgcacatggaacatttaccaagatagacaatattttgggtcaccgcaagtctcaacacattgaaaggattcagatcatataaagtatgctccatgaccatgatggaattgaattagaaaccaataatgtatctctggaaaatacacaaatatttggaaattaatatgccttctaaaaaatttatgcatcaagaagaaatcaaaagggatatttgaaagtactatgaactgatggccaggcatggtggctcacgcctgtaatcccagcactttgggaggccgagaaagatggatgaagtcaggagttcaagaccagcctgggcaacatggcagaaccccgtctctactaaaaatacaaaaaattagccgggcgtggtggtgggcgcctgtaatcccagctactcaggaggctgaggcatgagaatcgcttgaagctgggaggtggaggttgcagtgagccaagatcacgccactgcactccagcctgggcaacaagagtgaaactcggacaaagaaagaaagaaaagaaagagagagagaaggaaggaaggaaggaaggaaggaaggaaggagggagggagggaaggagggaaggaaggaaggaaggaaagaaggaaggagggagggagggaaacaaaaaagaaaaagaaagagaaaaagggaggaaagaaagaaaagaaagaaagaaaaagaaagaaagaaaagaaagaaactaactcaccatttagtaaccatagtagtaataactgatttgggcaagagtcatcaatgggtgaaagcttgatgaggaataggatacttatatacccccaaacaaagccacaaattattaataacaaaggggaaagtagtaattttacaatggcaagacaccactgtaaacggataatgaaagaacatcaacaataatgggaaaaaaatgatgcaatttacctcctgctatgctgctctgagaacaagcataatttctgtggtagtcctccaaaaatgcataacctgagtctgttcgtggggaggcatcagataaacccaaattgagggacattgtacaaaacaactggcctatatgcatcaaaaatgccaatgtcacaaagtctggggaactctccccagttcaggagacaattaaatgtaatgtgtgatcctggactgtgaaaaaagtaactataaaggatggtattgaaacagttgtcaagattggagtatagtagtaacaaatcaaggctaaattttcttattgtactgtcgtgtgtaaaagaatgtctttgttagaaaatacacactgaaatatccacaggtgaaggagaacaatagctccaatttacaaatgcttctgaaaaaatatatatatacacacacacatacagagagaaggcaagtgataaagcaagtggggcaagtttttttaaactggtgaatctgggtaaaggatattcaggaattctttgtactattgttgcaacatttctgtaagtttgaaatttaaagtttaaaaagaaagagaggccggactcagtggctcacgcctgtaatgccagcactttgggaggccgaggcgggcggatcacgaggtcaggagatcgagaccatcctggctaacacggtgaaaccccgtctgtactaaaaatacaaaaaattagccgggcgtggtggcgggcgcctgtagtctcagctactcgggaggctgaggcaggagaatggtgtgaacccgggaggcggagcttgcggtgagccgagatcgtgtcactgcactccagcctgggcgacagagcgagactccatctcaaaaaaaaaaaaaaaaggagagagaaggcataaacaatattaaaaataaaacagaacattactatagacgtagtagagattttaacgatcatgaagaaaatactagaaataagtctttatgttttattttattttattttatttattattattattttttgagatggagtctcattctgtagcccaggatggagtgcaacggcgcgatctctgctcactacaacctccgcctcccaggctcaagctattctcctgcctcagcctcccaagtagctgggattacagaaaagcgccaccacgcccaactaatttttgtatttttagtagagatggggtttcaccatgttggccaggcttatcttgaactcctgacttcaggtgatccacctgccttggcctcccaaagtgctgggattacaggcgtaagacaccgcgccaagccctttatcttttagatgtatatactgagatacttatcataaaatggtgggatatctgggatttccttgaagataatccagggcgccaggtatggtggctcacacctgtaatcccagcactttgggaggccaaggccggaggatcacttcagctcaggagttcaagatcagcctgggcaacatggggaaaccctgtctctattaaaaatacaaaaagtagctaggtgcggcggtagcacatgcctgtagttccagctacttgggaggctgagttgggaggatcacttaagcctaggaggtagagatcagcttcagcaacatggcaaaaccccatctctacaaaatatacaaaaattagctggacttggtggtgcacacctatagtcctagctacttgggaggctgaggtgggaggattacttgagcccaggaggtagaggtttcagtgaaccgagatcgtgtgactgcactccatcctggatgacagagtgagaccctgtctcaaaaaaaaaaacaaaactgcactcttttatgtatttttatacttttgaaatgttctataatatttttgaaatgttctataataagagaatattgtgaagactttatagaaatacatttgagaacctaaatagagtaaattactagaatcaaactaaggaaaaaatggaaaatctgaaaaaaatgcaataatcattaaagagattgaattgtcatttgaaagtctgtcctcacaaaagacctccttcctctactgtggtcagcatctttggcatacatgagataaaatgtatggtccagtccagcctctaagcctgtgcaattcattcagtcattcagcaaatatctattgaatactacgtatgggccaggcactcttctggctaccggggatacataagtgaacaacaacaacaacaacaacaacaaaggaaaaatgtctctaattttgtggcacttaatatacaacaaataataatgaataagtgatatatagtatgttaggaggagaacattactatggaaaaatagaggaggataaaggagactgagaggcagaaggatgggccagtttgtaatttgaaaggcaaggttgtaggcaaggttcagattggaacactgaaacacggatttcccacagaaatgaacaggtctccttggagagatggctaattcaaggtctgggtcaagaagtgtacaggaagagcctggaacattttgttgcaccaaaaagataaaacagaacaaaacaaaactcggttaattagttactgttggaagatgctagcaagccagttctttagtgatttttaaaagacagataattataaggaaactttttaataaacaagcatttatactgttttcgacacagactaccactgactactcaaataatacatgaggggatatttctttttatggaagtattctggctaataagaagaatagaattaatcaccagtggctgccagcaccacaaaaagagatacaactagatcttatgtgttttacaatttttttatatttggggggctggtctcttatatgtctcttttggagaaacagcccaccacctggattcatctcctagggcttccataacaaagtaccataaaatgagtgtcttaaaacaacacatggccgggcacagtggctcatgcctataatcccagcactttgggaggccgaggcgggcagatcacttgaggttaggagtttgagaccagcctggccaacaaggtgaaaccccgtgtctactaaaaatacaaaaattagccagacatggtggcgggcacctgtaatcccagctactcaggaggctgaggcaggagaatcgcttgaacctgggaggctgaggttgcagtgaggtgagatctcgccattgcactccagccttggcaacagagcgagactccatctcaaaaacaaacaaacaacaacaacaacaaaacactcacgtttattctctcaaagttctggaggctaaaactctgaaatcaaggtgtcaatagagctgtgctccctccaaaggctttaggggaggatccttccttgcttcctcctagattctggtggtttctggcaagctttgatattctttggcttatgactgcataattacaacctctacctccatattcatgtggccatcttccctctatgggtgtctgtgtccaaatttccctcttatggacaccagtcatattggattaggcttcccctaatccagtatgacctcatcttaacttgattacatctacaaaggccctatttccaaataaggtcacattcacagattccaggtagacatgaaatttgggtaacactatttaacccagtataccacctatgaagtattctttttatttttctcctcagcttttattttaagttctggggtacatgtttaggacgtgcagtttgttacataagtaaacgtgccatggtggtttgctgcacagatcaacccatcacctaggtattaagcccagcatccattagctatttttttctgatgctctcccaccacccgccccgcccccgacaggccccagtgtgtgttgttcccctccctgtgtccatgtgttctcattgttcagctcccacctataagtgagaacatgcagtgtttggttttctgttcctgcatttgtttgctgaggataacagcttccagctccatccatgtccctgcaaaggacatgatcttcttcttcttttttatggctgcatagtattctgaagtattcttgacaaaaagaaaaaatcaacctgaatctattcaagcctctagagtcaactaaaaatttacagaaaatacaggagactgagtaacgtgttaaatgacatcacagggatgcaattagccaactccagactatgggaaactctacaggacaaactacctggtatcttcaacaaataaattgcagggaataaagacatgatggaggaacctagactaaaagagacttaaagatgaaccagtagctatgtttggacctcatttggatcccaattcaaacaaactttaaaatacacacccatttatgacacttatgagacaattggagatttgaacactgacttgaatatccattgatattaaggaattatttttgaaaatgcggaataatactaaggctatggttttttttagagagtccttatcttttagaaacatatactaaatttgcagataaaaatgacttgatgttggggatttgtttcaaaataatatgggagttgggggatgtgggtgcagatatggctgtgacaagatggttcatgggctgataattgttgaagctgggtgatgggtacatgtgggagttcatgatactatatttttatgtgtttcaatctttccataataaaatttttttttagaaaaaagaaagaaaggaaagaaggaaagaaagaaaagaaagaaagaaagaaaaagaaaagaaagaaagaaagaaagaaaaagaaaaagaaagaaagaaagaaagaaagaaagaaagaaagaaagaaagaaagaaagaaaaaatacggtatcaggataagcctaaataagaaggtgacatttgctgtggatcgttcagcatgtacagggcccctgtcaccatctggctttaaaaatactaaaaaataaatcttgtgtaggggctgtgagagattaaagacggccacaaattctttttttaacccaattctcccataccatttattttaaaatttatgcatttttattaattaatttatttatgtatttagttttagagacagggtctcgctatgttgcccagactggccttgaactactgggctcaagtgatcctgcctcagccttctgagtagctgtaactacaggtgcccaccactgtgactagcctctgccacaaatgcttttctaattctccccttacctaaagctaattcccctccctttgaatttggcctggccttagagactggcttgaccaatagatggcagcagaagtgaagttccagggcttctgaggctaagtcataagaag

SEQ ID NO: 27 - DNA, 20 bp, Homo sapiens
gaatgatatgtctctcccga

SEQ ID NO: 28 - DNA, 20 bp, Homo sapiens
caagcaaccaaaggcagctc

SEQ ID NO: 29 - DNA, 20 bp, Homo sapiens
ccccacccaaatctcatctt

SEQ ID NO: 30 - DNA, 20 bp, Homo sapiens
cgaggcgggcagatcacgag

SEQ ID NO: 31 - DNA, 20 bp, Homo sapiens
ctacttatatccttttgaaa

SEQ ID NO: 32 - DNA, 20 bp, Homo sapiens
ggtatgtttcatccactggc

SEQ ID NO: 33 - DNA, 20 bp, Homo sapiens
cctcagcctcccgagtagct

SEQ ID NO: 34 - DNA, 20 bp, Homo sapiens
tttaagaaggagagcaagtg

SEQ ID NO: 35 - DNA, 20 bp, Homo sapiens
cttacaaaattcaagggcca

SEQ ID NO: 36 - DNA, 20 bp, Homo sapiens
aagttcaattttcgctaagt

SEQ ID NO: 37 - DNA, 20 bp, Homo sapiens
aaaatgtctctggacactga

SEQ ID NO: 38 - DNA, 20 bp, Homo sapiens
agagagagagagagagagag

SEQ ID NO: 39 - DNA, 20 bp, Homo sapiens
gcctaggcaaaaaaaaaaaa

SEQ ID NO: 40 - DNA, 20 bp, Homo sapiens
tatcattatcttattttttc

SEQ ID NO: 41 - DNA, 20 bp, Homo sapiens
tttttatgcaaagaatatga

SEQ ID NO: 42 - DNA, 20 bp, Homo sapiens
agtctaaaagcttactttaa

SEQ ID NO: 43 - DNA, 20 bp, Homo sapiens
tggcaattcgttacagcatc

SEQ ID NO: 44 - DNA, 20 bp, Homo sapiens
tgatgatgtttgcacaaccc

SEQ ID NO: 45 - protein, 1152 aa, Homo sapiens
MALRVLLLTALTLCHGFNLDTENAMTFQENARGFGQSVVQLQGSRVVVGAPQEIVAANQRGSLYQCDYSTGSCEPIRLQVPVEAVNMSLGLSLAATTSPPQLLACGPTVHQTCSENTYVKGLCFLFGSNLRQQPQKFPEALRGCPQEDSDIAFLIDGSGSIIPHDFRRMKEFVSTVMEQLKKSKTLFSLMQYSEEFRIHFTFKEFQNNPNPRSLVKPITQLLGRTHTATGIRKVVRELFNITNGARKNAFKILVVITDGEKFGDPLGYEDVIPEADREGVIRYVIGVGDAFRSEKSRQELNTIASKPPRDHVFQVNNFEALKTIQNQLREKIFAIEGTQTGSSSSFEHEMSQEGFSAAITSNGPLLSTVGSYDWAGGVFLYTSKEKSTFINMTRVDSDMNDAYLGYAAAIILRNRVQSLVLGAPRYQHIGLVAMFRQNTGMWESNANVKGTQIGAYFGASLCSVDVDSNGSTDLVLIGAPHYYEQTRGGQVSVCPLPRGRARWQCDAVLYGEQGQPWGRFGAALTVLGDVNGDKLTDVAIGAPGEEDNRGAVYLFHGTSGSGISPSHSQRIAGSKLSPRLQYFGQSLSGGQDLTMDGLVDLTVGAQGHVLLLRSQPVLRVKAIMEFNPREVARNVFECNDQVVKGKEAGEVRVCLHVQKSTRDRLREGQIQSVVTYDLALDSGRPHSRAVFNETKNSTRRQTQVLGLTQTCETLKLQLPNCIEDPVSPIVLRLNFSLVGTPLSAFGNLRPVLAEDAQRLFTALFPFEKNCGNDNICQDDLSITFSFMSLDCLVVGGPREFNVTVTVRNDGEDSYRTQVTFFFPLDLSYRKVSTLQNQRSQRSWRLACESASSTEVSGALKSTSCSINHPIFPENSEVTFNITFDVDSKASLGNKLLLKANVTSENNMPRTNKTEFQLELPVKYAVYMVVTSHGVSTKYLNFTASENTSRVMQHQYQVSNLGQRSLPISLVFLVPVRLNQTVIWDRPQVTFSENLSSTCHTKERLPSHSDFLAELRKAPVVNCSIAVCQRIQCDIPFFGIQEEFNATLKGNLSFDWYIKTSHNHLLIVSTAEILFNDSVFTLLPGQGAFVRSQTETKVEPFEVPNPLPLIVGSSVGGLLLLALITAALYKLGFFKRQYKDMMSEGGPPGAEPQ

SEQ ID NO: 46 - protein, 1163 aa, Homo sapiens
MTRTRAALLLFTALATSLGFNLDTEELTAFRVDSAGFGDSVVQYANSWVVVGAPQKITAANQTGGLYQCGYSTGACEPIGLQVPPEAVNMSLGLSLASTTSPSQLLACGPTVHHECGRNMYLTGLCFLLGPTQLTQRLPVSRQECPRQEQDIVFLIDGSGSISSRNFATMMNFVRAVISQFQRPSTQFSLMQFSNKFQTHFTFEEFRRSSNPLSLLASVHQLQGFTYTATAIQNVVHRLFHASYGARRDAAKILIVITDGKKEGDSLDYKDVIPMADAAGIIRYAIGVGLAFQNRNSWKELNDIASKPSQEHIFKVEDFDALKDIQNQLKEKIFAIEGTETTSSSSFELEMAQEGFSAVFTPDGPVLGAVGSFTWSGGAFLYPPNMSPTFINMSQENVDMRDSYLGYSTELALWKGVQSLVLGAPRYQHTGKAVIFTQVSRQWRMKAEVTGTQIGSYFGASLCSVDVDSDGSTDLVLIGAPHYYEQTRGGQVSVCPLPRGWRRWWCDAVLYGEQGHPWGRFGAALTVLGDVNGDKLTDVVIGAPGEEENRGAVYLFHGVLGPSISPSHSQRIAGSQLSSRLQYFGQALSGGQDLTQDGLVDLAVGARGQVLLLRTRPVLWVGVSMQFIPAEIPRSAFECREQVVSEQTLVQSNICLYIDKRSKNLLGSRDLQSSVTLDLALDPGRLSPRATFQETKNRSLSRVRVLGLKAHCENFNLLLPSCVEDSVTPITLRLNFTLVGKPLLAFRNLRPMLAADAQRYFTASLPFEKNCGADHICQDNLGISFSFPGLKSLLVGSNLELNAEVMVWNDGEDSYGTTITFSHPAGLSYRYVAEGQKQGQLRSLHLTCDSAPVGSQGTWSTSCRINHLIFRGGAQITFLATFDVSPKAVLGDRLLLTANVSSENNTPRTSKTTFQLELPVKYAVYTVVSSHEQFTKYLNFSESEEKESHVAMHRYQVNNLGQRDLPVSINFWVPVELNQEAVWMDVEVSHPQNPSLRCSSEKIAPPASDFLAHIQKNPVLDCSIAGCLRFRCDVPSFSVQEELDFTLKGNLSFGWVRQILQKKVSVVSVAEITFDTSVYSQLPGQEAFMRAQTTTVLEKYKVHNPTPLIVGSSIGGLLLLALITAVLYKVGFFKRQYKEMMEEANGQIAPENGTQTPSPPSEK

SEQ ID NO: 47 - protein, 375 aa, Homo sapiens
MERASCLLLLLLPLVHVSATTPEPCELDDEDFRCVCNFSEPQPDWSEAFQCVSAVEVEIHAGGLNLEPFLKRVDADADPRQYADTVKALRVRRLTVGAAQVPAQLLVGALRVLAYSRLKELTLEDLKITGTMPPLPLEATGLALSSLRLRNVSWATGRSWLAELQQWLKPGLKVLSIAQAHSPAFSCEQVRAFPALTSLDLSDNPGLGERGLMAALCPHKFPAIQNLALRNTGMETPTGVCAALAAAGVQPHSLDLSHNSLRATVNPSAPRCMWSSALNSLNLSFAGLEQVPKGLPAKLRVLDLSCNRLNRAPQPDELPEVDNLTLDGNPFLVPGTALPHEGSMNSGVVPACARSTLSVGVSGTLVLLQGARGFA

SEQ ID NO: 48 - protein, 254 aa, Homo sapiens
MWQLLLPTALLLLVSAGMRTEDLPKAVVFLEPQWYRVLEKDSVTLKCQGAYSPEDNSTQWFHNESLISSQASSYFIDAATVDDSGEYRCQTNLSTLSDPVQLEVHIGWLLLQAPRWVFKEEDPIHLRCHSWKNTALHKVTYLQNGKGRKYFHHNSDFYIPKATLKDSGSYFCRGLFGSKNVSSETVNITITQGLAVSTISSFFPPGYQVSFCLVMVLLFAVDTGLYFSVKTNIRSSTRDWKDHKFKWRKDPQDK

SEQ ID NO: 49 - protein, 510 aa, Homo sapiens
MEDTKESNVKTFCSKNILAILGFSSIIAVIALLAVGLTQNKALPENVKYGIVLDAGSSHTSLYIYKWPAEKENDTGVVHQVEECRVKGPGISKFVQKVNEIGIYLTDCMERAREVIPRSQHQETPVYLGATAGMRLLRMESEELADRVLDVVERSLSNYPFDFQGARIITGQEEGAYGWITINYLLGKFSQKTRWFSIVPYETNNQETFGALDLGGASTQVTFVPQNQTIESPDNALQFRLYGKDYNVYTHSFLCYGKDQALWQKLAKDIQVASNEILRDPCFHPGYKKVVNVSDLYKTPCTKRFEMTLPFQQFEIQGIGNYQQCHQSILELFNTSYCPYSQCAFNGIFLPPLQGDFGAFSAFYFVMKFLNLTSEKVSQEKVTEMMKKFCAQPWEEIKTSYAGVKEKYLSEYCFSGTYILSLLLQGYHFTADSWEHIHFIGKIQGSDAGWTLGYMLNLTNMIPAEQPLSTPLSHSTYVFLMVLFSLVLFTVAIIGLLIFHKPSYFWKDMV

SEQ ID NO: 50 - protein, 1306 aa, Homo sapiens
MTMYLWLKLLAFGFAFLDTEVFVTGQSPTPSPTGLTTAKMPSVPLSSDPLPTHTTAFSPASTFERENDFSETTTSLSPDNTSTQVSPDSLDNASAFNTTGVSSVQTPHLPTHADSQTPSAGTDTQTFSGSAANAKLNPTPGSNAISDVPGERSTASTFPTDPVSPLTTTLSLAHHSSAALPARTSNTTITANTSDAYLNASETTTLSPSGSAVISTTTIATTPSKPTCDEKYANITVDYLYNKETKLFTAKLNVNENVECGNNTCTNNEVHNLTECKNASVSISHNSCTAPDKTLILDVPPGVEKFQLHDCTQVEKADTTICLKWKNIETFTCDTQNITYRFQCGNMIFDNKEIKLENLEPEHEYKCDSEILYNNHKFTNASKIIKTDFGSPGEPQIIFCRSEAAHQGVITWNPPQRSFHNFTLCYIKETEKDCLNLDKNLIKYDLQNLKPYTKYVLSLHAYIIAKVQRNGSAAMCHFTTKSAPPSQVWNMTVSMTSDNSMHVKCRPPRDRNGPHERYHLEVEAGNTLVRNESHKNCDFRVKDLQYSTDYTFKAYFHNGDYPGEPFILHHSTSYNSKALIAFLAFLIIVTSIALLVVLYKIYDLHKKRSCNLDEQQELVERDDEKQLMNVEPIHADILLETYKRKIADEGRLFLAEFQSIPRVFSKFPIKEARKPFNQNKNRYVDILPYDYNRVELSEINGDAGSNYINASYIDGFKEPRKYIAAQGPRDETVDDFWRMIWEQKATVIVMVTRCEEGNRNKCAEYWPSMEEGTRAFGDVVVKINQHKRCPDYIIQKLNIVNKKEKATGREVTHIQFTSWPDHGVPEDPHLLLKLRRRVNAFSNFFSGPIVVHCSAGVGRTGTYIGIDAMLEGLEAENKVDVYGYVVKLRRQRCLMVQVEAQYILIHQALVEYNQFGETEVNLSELHPYLHNMKKRDPPSEPSPLEAEFQRLPSYRSWRTQHIGNQEENKSKNRNSNVIPYDYNRVPLKHELEMSKESEHDSDESSDDDSDSEEPSKYINASFIMSYWKPEVMIAAQGPLKETIGDFWQMIFQRKVKVIVMLTELKHGDQEICAQYWGEGKQTYGDIEVDLKDTDKSSTYTLRVFELRHSKRKDSRTVYQYQYTNWSVEQLPAEPKELISMIQVVKQKLPQKNSSEGNKHHKSTPLLIHCRDGSQQTGIFCALLNLLESAETEEVVDIFQVVKALRKARPGMVSTFEQYQFLYDVIASTYPAQNGQVKKNNHQEDKIEFDNEVDKVKQDANCVNPLGAPEKLPEAKEQAEGSEPTSGTEGPEHSVNGPASPALNQGS

SEQ ID NO: 51 - protein, 354 aa, Homo sapiens
MRLAVLFSGALLGLLAAQGTGNDCPHKKSATLLPSFTVTPTVTESTGTTSHRTTKSHKTTTHRTTTTGTTSHGPTTATHNPTTTSHGNVTVHPTSNSTATSQGPSTATHSPATTSHGNATVHPTSNSTATSPGFTSSAHPEPPPPSPSPSPTSKETIGDYTWTNGSQPCVHLQAQIQIRVMYTTQGGGEAWGISVLNPNKTKVQGSCEGAHPHLLLSFPYGHLSFGFMQDLQQKVVYLSYMAVEYNVSFPHAAQWTFSAQNASLRDLQAPLGQSFSCSNSSIILSPAVHLDLLSLRLQAAQLPHTGVFGQSFSCPSDRSILLPLIIGLILLGLLALVLIAFCIIRRRPSAYQAL

SEQ ID NO: 52 - protein, 972 aa, Homo sapiens
MGPGVLLLLLVATAWHGQGIPVIEPSVPELVVKPGATVTLRCVGNGSVEWDGPPSPHWTLYSDGSSSILSTNNATFQNTGTYRCTEPGDPLGGSAAIHLYVKDPARPWNVLAQEVVVFEDQDALLPCLLTDPVLEAGVSLVRVRGRPLMRHTNYSFSPWHGFTIHRAKFIQSQDYQCSALMGGRKVMSISIRLKVQKVIPGPPALTLVPAELVRIRGEAAQIVCSASSVDVNFDVFLQHNNTKLAIPQQSDFHNNRYQKVLTLNLDQVDFQHAGNYSCVASNVQGKHSTSMFFRVVESAYLNLSSEQNLIQEVTVGEGLNLKVMVEAYPGLQGFNWTYLGPFSDHQPEPKLANATTKDTYRHTFTLSLPRLKPSEAGRYSFLARNPGGWRALTFELTLRYPPEVSVIWTFINGSGTLLCAASGYPQPNVTWLQCSGHTDRCDEAQVLQVWDDPYPEVLSQEPFHKVTVQSLLTVETLEHNQTYECRAHNSVGSGSWAFIPISAGAHTHPPDEFLFTPVVVACMSIMALLLLLLLLLLYKYKQKPKYQVRWKIIESYEGNSYTFIDPTQLPYNEKWEFPRNNLQFGKTLGAGAFGKVVEATAFGLGKEDAVLKVAVKMLKSTAHADEKEALMSELKIMSHLGQHENIVNLLGACTHGGPVLVITEYCCYGDLLNFLRRKAEAMLGPSLSPGQDPEGGVDYKNIHLEKKYVRRDSGFSSQGVDTYVEMRPVSTSSNDSFSEQDLDKEDGRPLELRDLLHFSSQVAQGMAFLASKNCIHRDVAARNVLLTNGHVAKIGDFGLARDIMNDSNYIVKGNARLPVKWMAPESIFDCVYTVQSDVWSYGILLWEIFSLGLNPYPGILVNSKFYKLVKDGYQMAQPAFAPKNIYSIMQACWALEPTHRPTFQQICSFLQEQAQEDRRERDYTNLPSSSRSGGSGSSSSELEEESSSEHLTCCEQGDIAQPLLQPNNYQFC

SEQ ID NO: 53 - protein, 1156 aa, Homo sapiens
MSKLRMVLLEDSGSADFRRHFVNLSPFTITVVLLLSACFVTSSLGGTDKELRLVDGENKCSGRVEVKVQEEWGTVCNNGWSMEAVSVICNQLGCPTAIKAPGWANSSAGSGRIWMDHVSCRGNESALWDCKHDGWGKHSNCTHQQDAGVTCSDGSNLEMRLTRGGNMCSGRIEIKFQGRWGTVCDDNFNIDHASVICRQLECGSAVSFSGSSNFGEGSGPIWFDDLICNGNESALWNCKHQGWGKHNCDHAEDAGVICSKGADLSLRLVDGVTECSGRLEVRFQGEWGTICDDGWDSYDAAVACKQLGCPTAVTAIGRVNASKGFGHIWLDSVSCQGHEPAIWQCKHHEWGKHYCNHNEDAGVTCSDGSDLELRLRGGGSRCAGTVEVEIQRLLGKVCDRGWGLKEADVVCRQLGCGSALKTSYQVYSKIQATNTWLFLSSCNGNETSLWDCKNWQWGGLTCDHYEEAKITCSAHREPRLVGGDIPCSGRVEVKHGDTWGSICDSDFSLEAASVLCRELQCGTVVSILGGAHFGEGNGQIWAEEFQCEGHESHLSLCPVAPRPEGTCSHSRDVGVVCSRYTEIRLVNGKTPCEGRVELKTLGAWGSLCNSHWDIEDAHVLCQQLKCGVALSTPGGARFGKGNGQIWRHMFHCTGTEQHMGDCPVTALGASLCPSEQVASVICSGNQSQTLSSCNSSSLGPTRPTIPEESAVACIESGQLRLVNGGGRCAGRVEIYHEGSWGTICDDSWDLSDAHVVCRQLGCGEAINATGSAHFGEGTGPIWLDEMKCNGKESRIWQCHSHGWGQQNCRHKEDAGVICSEFMSLRLTSEASREACAGRLEVFYNGAWGTVGKSSMSETTVGVVCRQLGCADKGKINPASLDKAMSIPMWVDNVQCPKGPDTLWQCPSSPWEKRLASPSEETWITCDNKIRLQEGPTSCSGRVEIWHGGSWGTVCDDSWDLDDAQVVCQQLGCGPALKAFKEAEFGQGTGPIWLNEVKCKGNESSLWDCPARRWGHSECGHKEDAAVNCTDISVQKTPQKATTGRSSRQSSFIAVGILGVVLLAIFVALFFLTKKRRQRQRLAVSSRGENLVHQIQYREMNSCLNADDLDLMNSSENSHESADFSAAELISVSKFLPISGMEKEAILSHTEKENGNL

SEQ ID NO: 54 - protein, 355 aa, Homo sapiens
MDQFPESVTENFEYDDLAEACYIGDIVVFGTVFLSIFYSVIFAIGLVGNLLVVFALTNSKKPKSVTDIYLLNLALSDLLFVATLPFWTHYLINEKGLHNAMCKFTTAFFFIGFFGSIFFITVISIDRYLAIVLAANSMNNRTVQHGVTISLGVWAAAILVAAPQFMFTKQKENECLGDYPEVLQEIWPVLRNVETNFLGFLLPLLIMSYCYFRIIQTLFSCKNHKKAKAIKLILLVVIVFFLFWTPYNVMIFLETLKLYDFFPSCDMRKDLRLALSVTETVAFSHCCLNPLIYAFAGEKFRRYLYHLYGKCLAVLCGRSVHVDFSSSESQRSRHGSVLSSNFTYHTSDGDALLLL

SEQ ID NO: 55 - protein, 230 aa, Homo sapiens
MEPLRLLILLFVTELSGAHNTTVFQGVAGQSLQVSCPYDSMKHWGRRKAWCRQLGEKGPCQRVVSTHNLWLLSFLRRWNGSTAITDDTLGGTLTITLRNLQPHDAGLYQCQSLHGSEADTLRKVLVEVLADPLDHRDAGDLWFPGESESFEDAHVEHSISRSLLEGEIPFPPTSILLLLACIFLIKILAASALWAAAWHGQKPGTHPPSELDCGHDPGYQLQTLPGLRDT

SEQ ID NO: 56 - protein, 342 aa, Homo sapiens
MQAVDNLTSAPGNTSLCTRDYKITQVLFPLLYTVLFFVGLITNGLAMRIFFQIRSKSNFIIFLKNTVISDLLMILTFPFKILSDAKLGTGPLRTFVCQVTSVIFYFTMYISISFLGLITIDRYQKTTRPFKTSNPKNLLGAKILSVVIWAFMFLLSLPNMILTNRQPRDKNVKKCSFLKSEFGLVWHEIVNYICQVIFWINFLIVIVCYTLITKELYRSYVRTRGVGKVPRKKVNVKVFIIIAVFFICFVPFHFARIPYTLSQTRDVFDCTAENTLFYVKESTLWLTSLNACLDPFIYFFLCKSFRNSLISMLKCPNSATSLSQDNRKKEQDGGDPNEETPM

SEQ ID NO: 57 - protein, 283 aa, Homo sapiens
MVSAAAPSLLILLLLLLGSVPATDARSVPLKATFLEDVAGSGEAEGSSASSPSLPPPWTPALSPTSMGPQPITLGGPSPPTNFLDGIVDFFRQYVMLIAVVGSLAFLLMFIVCAAVITRQKQKASAYYPSSFPKKKYVDQSDRAGGPRAFSEVPDRAPDSRPEEALDSSRQLQADILAATQNLKSPTRAALGGGDGARMVEGRGAEEEEKGSQEGDQEVQGHGVPVETPEAQEEPCSGVLEGAVVAGEGQGELEGSLLLAQEAQGPVGPPESPCACSSVHPSV

SEQ ID NO: 58 - protein, 254 aa, Homo sapiens
MAISGVPVLGFFIIAVLMSAQESWAIKEEHVIIQAEFYLNPDQSGEFMFDFDGDEIFHVDMAKKETVWRLEEFGRFASFEAQGALANIAVDKANLEIMTKRSNYTPITNVPPEVTVLTNSPVELREPNVLICFIDKFTPPVVNVTWLRNGKPVTTGVSETVFLPREDHLFRKFHYLPFLPSTEDVYDCRVEHWGLDEPLLKHWEFDAPSPLPETTENVVCALGLTVGLVGIIIGTIFIIKGVRKSNAAERRGPL

SEQ ID NO: 59 - protein, 20 aa, Homo sapiens
GGTATGTTTCATCCACTGGC

SEQ ID NO: 60 - DNA, 20 bp, Homo sapiens
gtctatacaaaggaagacct

SEQ ID NO: 61 - DNA, 7844 bp, artificial sequence
  vector PUC_AAVS1_p-Resp-(PU.1-CEBPB)
gaactttaaaagtgctcatcattggaaaacgttcttcggggcgaaaactctcaaggatcttaccgctgttgagatccagttcgatgtaacccactcgtgcacccaactgatcttcagcatcttttactttcaccagcgtttctgggtgagcaaaaacaggaaggcaaaatgccgcaaaaaagggaataagggcgacacggaaatgttgaatactcatactcttcctttttcaatattattgaagcatttatcagggttattgtctcatgagcggatacatatttgaatgtatttagaaaaataaacaaataggggttccgcgcacatttccccgaaaagtgccacctgacgtctaagaaaccattattatcatgacattaacctataaaaataggcgtatcacgaggccctttcgtctcgcgcgtttcggtgatgacggtgaaaacctctgacacatgcagctcccggagacggtcacagcttgtctgtaagcggatgccgggagcagacaagcccgtcagggcgcgtcagcgggtgttggcgggtgtcggggctggcttaactatgcggcatcagagcagattgtactgagagtgcaccatatgcggtgtgaaataccgcacagatgcgtaaggagaaaataccgcatcaggcgccattcgccattcaggctgcgcaactgttgggaagggcgatcggtgcgggcctcttcgctattacgccagctggcgaaagggggatgtgctgcaaggcgattaagttgggtaacgccagggttttcccagtcacgacgttgtaaaacgacggccagtgaattgtgctttctctgaccagcattctctcccctgggcctgtgccgctttctgtctgtagcttgtggcctgggtcacctctacggctggcccagatccttccctgccgcctccttcaggttccgtcttcctccactccctcttccccttgctctctgctgtgttgctgcccaaggatgctctttccggagcacttccttctcggcgctgcaccacgtgatgtcctctgagcggatcctccccgtgtctgggtcctctccgggcatctctcctccctcacccaaccccatgccgtcttcactcgctgggttcccttttccttctccttctggggcctgtgccatctctcgtttcttaggatggccttctccgacggatgtctcccttgcgtcccgcctccccttcttgtaggcctgcatcatcaccgtttttctggacaaccccaaagtaccccgtctccctggctttagccacctctccatcctcttgctttctttgcctggacaccccgttctcctgtggattcgggtcacctctcactcctttcatttgggcagctcccctaccccccttacctctctagtctgtgctagctcttccagccccctgtcatggcatcttccaggggtccgagagctcagctagtcttcttcctccaacccgggcccctatgtccacttcaggacagcatgtttgctgcctccagggatcctgtgtccccgagctgggaccaccttatattcccagggccggttaatgtggctctggttctgggtacttttatctgtcccctccaccccacagtggggcaagcttctgacctcttctcttcctcccacagggcctcgagagatctggcagcggagagggcagaggaagtcttctaacatgcggtgacgtggaggagaatcccggccctaggctcgagatgaccgagtacaagcccacggtgcgcctcgccacccgcgacgacgtccccagggccgtacgcaccctcgccgccgcgttcgccgactaccccgccacgcgccacaccgtcgatccggaccgccacatcgagcgggtcaccgagctgcaagaactcttcctcacgcgcgtcgggctcgacatcggcaaggtgtgggtcgcggacgacggcgccgcggtggcggtctggaccacgccggagagcgtcgaagcgggggcggtgttcgccgagatcggcccgcgcatggccgagttgagcggttcccggctggccgcgcagcaacagatggaaggcctcctggcgccgcaccggcccaaggagcccgcgtggttcctggccaccgtcggcgtctcgcccgaccaccagggcaagggtctgggcagcgccgtcgtgctccccggagtggaggcggccgagcgcgccggggtgcccgccttcctggagacctccgcgccccgcaacctccccttctacgagcggctcggcttcaccgtcaccgccgacgtcgaggtgcccgaaggaccgcgcacctggtgcatgacccgcaagcccggtgcctgatctagagggcccgtttaaacccgctgatcagcctcgactgtgccttctagttgccagccatctgttgtttgcccctcccccgtgccttccttgaccctggaaggtgccactcccactgtcctttcctaataaaatgaggaaattgcatcgcattgtctgagtaggtgtcattctattctggggggtggggtggggcaggacagcaagggggaggattgggaagacaatagcaggcatgctggggatgcggtgggctctatggtcactcgagtttactccctatcagtgatagagaacgtatgaagagtttactccctatcagtgatagagaacgtatgcagactttactccctatcagtgatagagaacgtataaggagtttactccctatcagtgatagagaacgtatgaccagtttactccctatcagtgatagagaacgtatctacagtttactccctatcagtgatagagaacgtatatccagtttactccctatcagtgatagagaacgtatgtcgaggtaggcgtgtacggtgggcgcctataaaagcagagctcgtttagtgaaccgtcagatcgcctggagcaattccacaacacttttgtcttatacttactagtgccaccatgttacaggcgtgcaaaatggaagggtttcccctcgtcccccctccatcagaagacctggtgccctatgacacggatctataccaacgccaaacgcacgagtattacccctatctcagcagtgatggggagagccatagcgaccattactgggacttccacccccaccacgtgcacagcgagttcgagagcttcgccgagaacaacttcacggagctccagagcgtgcagcccccgcagctgcagcagctctaccgccacatggagctggagcagatgcacgtcctcgatacccccatggtgccaccccatcccagtcttggccaccaggtctcctacctgccccggatgtgcctccagtacccatccctgtccccagcccagcccagctcagatgaggaggagggcgagcggcagagccccccactggaggtgtctgacggcgaggcggatggcctggagcccgggcctgggctcctgcctggggagacaggcagcaagaagaagatccgcctgtaccagttcctgttggacctgctccgcagcggcgacatgaaggacagcatctggtgggtggacaaggacaagggcaccttccagttctcgtccaagcacaaggaggcgctggcgcaccgctggggcatccagaagggcaaccgcaagaagatgacctaccagaagatggcgcgcgcgctgcgcaactacggcaagacgggcgaggtcaagaaggtgaagaagaagctcacctaccagttcagcggcgaagtgctgggccgcgggggcctggccgagcggcgccacccgccccacggatcgggagagggcaggggaagtcttctaacatgcggggacgtggaggaaaatcccggccccatgcaacgcctggtggcctgggacccagcatgtctccccctgccgccgccgccgcctgcctttaaatccatggaagtggccaacttctactacgaggcggactgcttggctgctgcgtacggcggcaaggcggcccccgcggcgccccccgcggccagacccgggccgcgcccccccgccggcgagctgggcagcatcggcgaccacgagcgcgccatcgacttcagcccgtacctggagccgctgggcgcgccgcaggccccggcgcccgccacggccacggacaccttcgaggcggctccgcccgcgcccgcccccgcgcccgcctcctccgggcagcaccacgacttcctctccgacctcttctccgacgactacgggggcaagaactgcaagaagccggccgagtacggctacgtgagcctggggcgcctgggggccgccaagggcgcgctgcaccccggctgcttcgcgcccctgcacccaccgcccccgccgccgccgccgcccgccgagctcaaggcggagccgggcttcgagcccgcggactgcaagcggaaggaggaggccggggcgccgggcggcggcgcaggcatggcggcgggcttcccgtacgcgctgcgcgcttacctcggctaccaggcggtgccgagcggcagcagcgggagcctctccacgtcctcctcgtccagcccgcccggcacgccgagccccgctgacgccaaggcgcccccgaccgcctgctacgcgggggccgcgccggcgccctcgcaggtcaagagcaaggccaagaagaccgtggacaagcacagcgacgagtacaagatccggcgcgagcgcaacaacatcgccgtgcgcaagagccgcgacaaggccaagatgcgcaacctggagacgcagcacaaggtcctggagctcacggccgagaacgagcggctgcagaagaaggtggagcagctgtcgcgcgagctcagcaccctgcggaacttgttcaagcagctgcccgagcccctgctcgcctcctccggccactgctaggaattcgagctcggtacccggggatcctctagtcagctgacgcgtgctagcgcggccgcatcgataagcttgtcgacgatatctctagaggatcataatcagccataccacatttgtagaggttttacttgctttaaaaaacctcccacacctccccctgaacctgaaacataaaatgaatgcaattgttgttgttaacttgtttattgcagcttataatggttacaaataaagcaatagcatcacaaatttcacaaataaagcatttttttcactgccttgacagtactcttaagtcgacttactagggacaggattggtgacagaaaagccccatccttaggcctcctccttcctagtctcctgatattgggtctaacccccacctcctgttaggcagattccttatctggtgacacacccccatttcctggagccatctctctccttgccagaacctctaaggtttgcttacgatggagccagagaggatcctgggagggagagcttggcagggggtgggagggaagggggggatgcgtgacctgcccggttctcagtggccaccctgcgctaccctctcccagaacctgagctgctctgacgcggctgtctggtgcgtttcactgatcctggtgctgcagcttccttacacttcccaagaggagaagcagtttggaaaaacaaaatcagaataagttggtcctgagttctaactttggctcttcacctttctagtccccaatttatattgttcctccgtgcgtcagttttacctgtgagataaggccagtagccagccccgtcctggcagggctgtggtgaggaggggggtgtccgtgtggaaaactccctttgtgagaatggtgcgtcctaggtgttcaccaggtcgtggccgcctctactccctttctctttctccatccttctttccttaaagagtccccagtgctatctgggacatattcctccgcccagagcagggtcccgcttccctaaggccctgctctgggcttctgggtttgagtccttggcaagcccaggagaggcgctcaggcttccctgtcccccttcctcgtccaccatctcatgcccctggctctcctgccccttccctacaggggttcctggctctgctctaagcttggcgtaatcatggtcatagctgtttcctgtgtgaaattgttatccgctcacaattccacacaacatacgagccggaagcataaagtgtaaagcctggggtgcctaatgagtgagctaactcacattaattgcgttgcgctcactgcccgctttccagtcgggaaacctgtcgtgccagctgcattaatgaatcggccaacgcgcggggagaggcggtttgcgtattgggcgctcttccgcttcctcgctcactgactcgctgcgctcggtcgttcggctgcggcgagcggtatcagctcactcaaaggcggtaatacggttatccacagaatcaggggataacgcaggaaagaacatgtgagcaaaaggccagcaaaaggccaggaaccgtaaaaaggccgcgttgctggcgtttttccataggctccgcccccctgacgagcatcacaaaaatcgacgctcaagtcagaggtggcgaaacccgacaggactataaagataccaggcgtttccccctggaagctccctcgtgcgctctcctgttccgaccctgccgcttaccggatacctgtccgcctttctcccttcgggaagcgtggcgctttctcatagctcacgctgtaggtatctcagttcggtgtaggtcgttcgctccaagctgggctgtgtgcacgaaccccccgttcagcccgaccgctgcgccttatccggtaactatcgtcttgagtccaacccggtaagacacgacttatcgccactggcagcagccactggtaacaggattagcagagcgaggtatgtaggcggtgctacagagttcttgaagtggtggcctaactacggctacactagaagaacagtatttggtatctgcgctctgctgaagccagttaccttcggaaaaagagttggtagctcttgatccggcaaacaaaccaccgctggtagcggtggtttttttgtttgcaagcagcagattacgcgcagaaaaaaaggatctcaagaagatcctttgatcttttctacggggtctgacgctcagtggaacgaaaactcacgttaagggattttggtcatgagattatcaaaaaggatcttcacctagatccttttaaattaaaaatgaagttttaaatcaatctaaagtatatatgagtaaacttggtctgacagttaccaatgcttaatcagtgaggcacctatctcagcgatctgtctatttcgttcatccatagttgcctgactccccgtcgtgtagataactacgatacgggagggcttaccatctggccccagtgctgcaatgataccgcgagacccacgctcaccggctccagatttatcagcaataaaccagccagccggaagggccgagcgcagaagtggtcctgcaactttatccgcctccatccagtctattaattgttgccgggaagctagagtaagtagttcgccagttaatagtttgcgcaacgttgttgccattgctacaggcatcgtggtgtcacgctcgtcgtttggtatggcttcattcagctccggttcccaacgatcaaggcgagttacatgatcccccatgttgtgcaaaaaagcggttagctccttcggtcctccgatcgttgtcagaagtaagttggccgcagtgttatcactcatggttatggcagcactgcataattctcttactgtcatgccatccgtaagatgcttttctgtgactggtgagtactcaaccaagtcattctgagaatagtgtatgcggcgaccgagttgctcttgcccggcgtcaatacgggataataccgcgccacatagca

SEQ ID NO: 62 - DNA, 8087 bp, artificial sequence
  vector pUC_AAVS1_p-Resp-(PU.1-IRF8)
gaactttaaaagtgctcatcattggaaaacgttcttcggggcgaaaactctcaaggatcttaccgctgttgagatccagttcgatgtaacccactcgtgcacccaactgatcttcagcatcttttactttcaccagcgtttctgggtgagcaaaaacaggaaggcaaaatgccgcaaaaaagggaataagggcgacacggaaatgttgaatactcatactcttcctttttcaatattattgaagcatttatcagggttattgtctcatgagcggatacatatttgaatgtatttagaaaaataaacaaataggggttccgcgcacatttccccgaaaagtgccacctgacgtctaagaaaccattattatcatgacattaacctataaaaataggcgtatcacgaggccctttcgtctcgcgcgtttcggtgatgacggtgaaaacctctgacacatgcagctcccggagacggtcacagcttgtctgtaagcggatgccgggagcagacaagcccgtcagggcgcgtcagcgggtgttggcgggtgtcggggctggcttaactatgcggcatcagagcagattgtactgagagtgcaccatatgcggtgtgaaataccgcacagatgcgtaaggagaaaataccgcatcaggcgccattcgccattcaggctgcgcaactgttgggaagggcgatcggtgcgggcctcttcgctattacgccagctggcgaaagggggatgtgctgcaaggcgattaagttgggtaacgccagggttttcccagtcacgacgttgtaaaacgacggccagtgaattgtgctttctctgaccagcattctctcccctgggcctgtgccgctttctgtctgtagcttgtggcctgggtcacctctacggctggcccagatccttccctgccgcctccttcaggttccgtcttcctccactccctcttccccttgctctctgctgtgttgctgcccaaggatgctctttccggagcacttccttctcggcgctgcaccacgtgatgtcctctgagcggatcctccccgtgtctgggtcctctccgggcatctctcctccctcacccaaccccatgccgtcttcactcgctgggttcccttttccttctccttctggggcctgtgccatctctcgtttcttaggatggccttctccgacggatgtctcccttgcgtcccgcctccccttcttgtaggcctgcatcatcaccgtttttctggacaaccccaaagtaccccgtctccctggctttagccacctctccatcctcttgctttctttgcctggacaccccgttctcctgtggattcgggtcacctctcactcctttcatttgggcagctcccctaccccccttacctctctagtctgtgctagctcttccagccccctgtcatggcatcttccaggggtccgagagctcagctagtcttcttcctccaacccgggcccctatgtccacttcaggacagcatgtttgctgcctccagggatcctgtgtccccgagctgggaccaccttatattcccagggccggttaatgtggctctggttctgggtacttttatctgtcccctccaccccacagtggggcaagcttctgacctcttctcttcctcccacagggcctcgagagatctggcagcggagagggcagaggaagtcttctaacatgcggtgacgtggaggagaatcccggccctaggctcgagatgaccgagtacaagcccacggtgcgcctcgccacccgcgacgacgtccccagggccgtacgcaccctcgccgccgcgttcgccgactaccccgccacgcgccacaccgtcgatccggaccgccacatcgagcgggtcaccgagctgcaagaactcttcctcacgcgcgtcgggctcgacatcggcaaggtgtgggtcgcggacgacggcgccgcggtggcggtctggaccacgccggagagcgtcgaagcgggggcggtgttcgccgagatcggcccgcgcatggccgagttgagcggttcccggctggccgcgcagcaacagatggaaggcctcctggcgccgcaccggcccaaggagcccgcgtggttcctggccaccgtcggcgtctcgcccgaccaccagggcaagggtctgggcagcgccgtcgtgctccccggagtggaggcggccgagcgcgccggggtgcccgccttcctggagacctccgcgccccgcaacctccccttctacgagcggctcggcttcaccgtcaccgccgacgtcgaggtgcccgaaggaccgcgcacctggtgcatgacccgcaagcccggtgcctgatctagagggcccgtttaaacccgctgatcagcctcgactgtgccttctagttgccagccatctgttgtttgcccctcccccgtgccttccttgaccctggaaggtgccactcccactgtcctttcctaataaaatgaggaaattgcatcgcattgtctgagtaggtgtcattctattctggggggtggggtggggcaggacagcaagggggaggattgggaagacaatagcaggcatgctggggatgcggtgggctctatggtcactcgagtttactccctatcagtgatagagaacgtatgaagagtttactccctatcagtgatagagaacgtatgcagactttactccctatcagtgatagagaacgtataaggagtttactccctatcagtgatagagaacgtatgaccagtttactccctatcagtgatagagaacgtatctacagtttactccctatcagtgatagagaacgtatatccagtttactccctatcagtgatagagaacgtatgtcgaggtaggcgtgtacggtgggcgcctataaaagcagagctcgtttagtgaaccgtcagatcgcctggagcaattccacaacacttttgtcttatacttactagtgccaccatgttacaggcgtgcaaaatggaagggtttcccctcgtcccccctccatcagaagacctggtgccctatgacacggatctataccaacgccaaacgcacgagtattacccctatctcagcagtgatggggagagccatagcgaccattactgggacttccacccccaccacgtgcacagcgagttcgagagcttcgccgagaacaacttcacggagctccagagcgtgcagcccccgcagctgcagcagctctaccgccacatggagctggagcagatgcacgtcctcgatacccccatggtgccaccccatcccagtcttggccaccaggtctcctacctgccccggatgtgcctccagtacccatccctgtccccagcccagcccagctcagatgaggaggagggcgagcggcagagccccccactggaggtgtctgacggcgaggcggatggcctggagcccgggcctgggctcctgcctggggagacaggcagcaagaagaagatccgcctgtaccagttcctgttggacctgctccgcagcggcgacatgaaggacagcatctggtgggtggacaaggacaagggcaccttccagttctcgtccaagcacaaggaggcgctggcgcaccgctggggcatccagaagggcaaccgcaagaagatgacctaccagaagatggcgcgcgcgctgcgcaactacggcaagacgggcgaggtcaagaaggtgaagaagaagctcacctaccagttcagcggcgaagtgctgggccgcgggggcctggccgagcggcgccacccgccccacggatcgggagagggcaggggaagtcttctaacatgcggggacgtggaggaaaatcccggccccatgtgtgaccggaatggtggtcggcggcttcgacagtggctgatcgagcagattgacagtagcatgtatccaggactgatttgggagaatgaggagaagagcatgttccggatcccttggaaacacgctggcaagcaagattataatcaggaagtggatgcctccatttttaaggcctgggcagtttttaaagggaagtttaaagaaggggacaaagctgaaccagccacttggaagacgaggttacgctgtgctttgaataagagcccagattttgaggaagtgacggaccggtcccaactggacatttccgagccatacaaagtttaccgaattgttcctgaggaagagcaaaaatgcaaactaggcgtggcaactgctggctgcgtgaatgaagttacagagatggagtgcggtcgctctgaaatcgacgagctgatcaaggagccttctgtggacgattacatggggatgatcaaaaggagcccttccccgccggaggcctgtcggagtcagctccttccagactggtgggcgcagcagcccagcacaggcgtgccgctggtgacggggtacaccacctacgacgcgcaccattcagcattctcccagatggtgatcagcttctactatgggggcaagctggtgggccaggccaccaccacctgccccgagggctgccgcctgtccctgagccagcctgggctgcccggcaccaagctgtatgggcccgagggcctggagctggtgcgcttcccgccggccgacgccatccccagcgagcgacagaggcaggtgacgcggaagctgttcgggcacctggagcgcggggtgctgctgcacagcagccggcagggcgtgttcgtcaagcggctgtgccagggccgcgtgttctgcagcggcaacgccgtggtgtgcaaaggcaggcccaacaagctggagcgtgatgaggtggtccaggtcttcgacaccagccagttcttccgagagctgcagcagttctataacagccagggccggcttcctgacggcagggtggtgctgtgctttggggaagagtttccggatatggcccccttgcgctccaaactcattctcgtgcagattgagcagctgtatgtccggcaactggcagaagaggctgggaagagctgtggagccggctctgtgatgcaggcccccgaggagccgccgccagaccaggtcttccggatgtttccagatatttgtgcctcacaccagagatcatttttcagagaaaaccaacagatcaccgtctaagaattcgagctcggtacccggggatcctctagtcagctgacgcgtgctagcgcggccgcatcgataagcttgtcgacgatatctctagaggatcataatcagccataccacatttgtagaggttttacttgctttaaaaaacctcccacacctccccctgaacctgaaacataaaatgaatgcaattgttgttgttaacttgtttattgcagcttataatggttacaaataaagcaatagcatcacaaatttcacaaataaagcatttttttcactgccttgacagtactcttaagtcgacttactagggacaggattggtgacagaaaagccccatccttaggcctcctccttcctagtctcctgatattgggtctaacccccacctcctgttaggcagattccttatctggtgacacacccccatttcctggagccatctctctccttgccagaacctctaaggtttgcttacgatggagccagagaggatcctgggagggagagcttggcagggggtgggagggaagggggggatgcgtgacctgcccggttctcagtggccaccctgcgctaccctctcccagaacctgagctgctctgacgcggctgtctggtgcgtttcactgatcctggtgctgcagcttccttacacttcccaagaggagaagcagtttggaaaaacaaaatcagaataagttggtcctgagttctaactttggctcttcacctttctagtccccaatttatattgttcctccgtgcgtcagttttacctgtgagataaggccagtagccagccccgtcctggcagggctgtggtgaggaggggggtgtccgtgtggaaaactccctttgtgagaatggtgcgtcctaggtgttcaccaggtcgtggccgcctctactccctttctctttctccatccttctttccttaaagagtccccagtgctatctgggacatattcctccgcccagagcagggtcccgcttccctaaggccctgctctgggcttctgggtttgagtccttggcaagcccaggagaggcgctcaggcttccctgtcccccttcctcgtccaccatctcatgcccctggctctcctgccccttccctacaggggttcctggctctgctctaagcttggcgtaatcatggtcatagctgtttcctgtgtgaaattgttatccgctcacaattccacacaacatacgagccggaagcataaagtgtaaagcctggggtgcctaatgagtgagctaactcacattaattgcgttgcgctcactgcccgctttccagtcgggaaacctgtcgtgccagctgcattaatgaatcggccaacgcgcggggagaggcggtttgcgtattgggcgctcttccgcttcctcgctcactgactcgctgcgctcggtcgttcggctgcggcgagcggtatcagctcactcaaaggcggtaatacggttatccacagaatcaggggataacgcaggaaagaacatgtgagcaaaaggccagcaaaaggccaggaaccgtaaaaaggccgcgttgctggcgtttttccataggctccgcccccctgacgagcatcacaaaaatcgacgctcaagtcagaggtggcgaaacccgacaggactataaagataccaggcgtttccccctggaagctccctcgtgcgctctcctgttccgaccctgccgcttaccggatacctgtccgcctttctcccttcgggaagcgtggcgctttctcatagctcacgctgtaggtatctcagttcggtgtaggtcgttcgctccaagctgggctgtgtgcacgaaccccccgttcagcccgaccgctgcgccttatccggtaactatcgtcttgagtccaacccggtaagacacgacttatcgccactggcagcagccactggtaacaggattagcagagcgaggtatgtaggcggtgctacagagttcttgaagtggtggcctaactacggctacactagaagaacagtatttggtatctgcgctctgctgaagccagttaccttcggaaaaagagttggtagctcttgatccggcaaacaaaccaccgctggtagcggtggtttttttgtttgcaagcagcagattacgcgcagaaaaaaaggatctcaagaagatcctttgatcttttctacggggtctgacgctcagtggaacgaaaactcacgttaagggattttggtcatgagattatcaaaaaggatcttcacctagatccttttaaattaaaaatgaagttttaaatcaatctaaagtatatatgagtaaacttggtctgacagttaccaatgcttaatcagtgaggcacctatctcagcgatctgtctatttcgttcatccatagttgcctgactccccgtcgtgtagataactacgatacgggagggcttaccatctggccccagtgctgcaatgataccgcgagacccacgctcaccggctccagatttatcagcaataaaccagccagccggaagggccgagcgcagaagtggtcctgcaactttatccgcctccatccagtctattaattgttgccgggaagctagagtaagtagttcgccagttaatagtttgcgcaacgttgttgccattgctacaggcatcgtggtgtcacgctcgtcgtttggtatggcttcattcagctccggttcccaacgatcaaggcgagttacatgatcccccatgttgtgcaaaaaagcggttagctccttcggtcctccgatcgttgtcagaagtaagttggccgcagtgttatcactcatggttatggcagcactgcataattctcttactgtcatgccatccgtaagatgcttttctgtgactggtgagtactcaaccaagtcattctgagaatagtgtatgcggcgaccgagttgctcttgcccggcgtcaatacgggataataccgcgccacatagca

SEQ ID NO: 63 - DNA, 8255 bp, artificial sequence
  vector pUC_AAVS1_p-Resp-(PU.1-RUNX1)
gaactttaaaagtgctcatcattggaaaacgttcttcggggcgaaaactctcaaggatcttaccgctgttgagatccagttcgatgtaacccactcgtgcacccaactgatcttcagcatcttttactttcaccagcgtttctgggtgagcaaaaacaggaaggcaaaatgccgcaaaaaagggaataagggcgacacggaaatgttgaatactcatactcttcctttttcaatattattgaagcatttatcagggttattgtctcatgagcggatacatatttgaatgtatttagaaaaataaacaaataggggttccgcgcacatttccccgaaaagtgccacctgacgtctaagaaaccattattatcatgacattaacctataaaaataggcgtatcacgaggccctttcgtctcgcgcgtttcggtgatgacggtgaaaacctctgacacatgcagctcccggagacggtcacagcttgtctgtaagcggatgccgggagcagacaagcccgtcagggcgcgtcagcgggtgttggcgggtgtcggggctggcttaactatgcggcatcagagcagattgtactgagagtgcaccatatgcggtgtgaaataccgcacagatgcgtaaggagaaaataccgcatcaggcgccattcgccattcaggctgcgcaactgttgggaagggcgatcggtgcgggcctcttcgctattacgccagctggcgaaagggggatgtgctgcaaggcgattaagttgggtaacgccagggttttcccagtcacgacgttgtaaaacgacggccagtgaattgtgctttctctgaccagcattctctcccctgggcctgtgccgctttctgtctgtagcttgtggcctgggtcacctctacggctggcccagatccttccctgccgcctccttcaggttccgtcttcctccactccctcttccccttgctctctgctgtgttgctgcccaaggatgctctttccggagcacttccttctcggcgctgcaccacgtgatgtcctctgagcggatcctccccgtgtctgggtcctctccgggcatctctcctccctcacccaaccccatgccgtcttcactcgctgggttcccttttccttctccttctggggcctgtgccatctctcgtttcttaggatggccttctccgacggatgtctcccttgcgtcccgcctccccttcttgtaggcctgcatcatcaccgtttttctggacaaccccaaagtaccccgtctccctggctttagccacctctccatcctcttgctttctttgcctggacaccccgttctcctgtggattcgggtcacctctcactcctttcatttgggcagctcccctaccccccttacctctctagtctgtgctagctcttccagccccctgtcatggcatcttccaggggtccgagagctcagctagtcttcttcctccaacccgggcccctatgtccacttcaggacagcatgtttgctgcctccagggatcctgtgtccccgagctgggaccaccttatattcccagggccggttaatgtggctctggttctgggtacttttatctgtcccctccaccccacagtggggcaagcttctgacctcttctcttcctcccacagggcctcgagagatctggcagcggagagggcagaggaagtcttctaacatgcggtgacgtggaggagaatcccggccctaggctcgagatgaccgagtacaagcccacggtgcgcctcgccacccgcgacgacgtccccagggccgtacgcaccctcgccgccgcgttcgccgactaccccgccacgcgccacaccgtcgatccggaccgccacatcgagcgggtcaccgagctgcaagaactcttcctcacgcgcgtcgggctcgacatcggcaaggtgtgggtcgcggacgacggcgccgcggtggcggtctggaccacgccggagagcgtcgaagcgggggcggtgttcgccgagatcggcccgcgcatggccgagttgagcggttcccggctggccgcgcagcaacagatggaaggcctcctggcgccgcaccggcccaaggagcccgcgtggttcctggccaccgtcggcgtctcgcccgaccaccagggcaagggtctgggcagcgccgtcgtgctccccggagtggaggcggccgagcgcgccggggtgcccgccttcctggagacctccgcgccccgcaacctccccttctacgagcggctcggcttcaccgtcaccgccgacgtcgaggtgcccgaaggaccgcgcacctggtgcatgacccgcaagcccggtgcctgatctagagggcccgtttaaacccgctgatcagcctcgactgtgccttctagttgccagccatctgttgtttgcccctcccccgtgccttccttgaccctggaaggtgccactcccactgtcctttcctaataaaatgaggaaattgcatcgcattgtctgagtaggtgtcattctattctggggggtggggtggggcaggacagcaagggggaggattgggaagacaatagcaggcatgctggggatgcggtgggctctatggtcactcgagtttactccctatcagtgatagagaacgtatgaagagtttactccctatcagtgatagagaacgtatgcagactttactccctatcagtgatagagaacgtataaggagtttactccctatcagtgatagagaacgtatgaccagtttactccctatcagtgatagagaacgtatctacagtttactccctatcagtgatagagaacgtatatccagtttactccctatcagtgatagagaacgtatgtcgaggtaggcgtgtacggtgggcgcctataaaagcagagctcgtttagtgaaccgtcagatcgcctggagcaattccacaacacttttgtcttatacttactagtgccaccatgttacaggcgtgcaaaatggaagggtttcccctcgtcccccctccatcagaagacctggtgccctatgacacggatctataccaacgccaaacgcacgagtattacccctatctcagcagtgatggggagagccatagcgaccattactgggacttccacccccaccacgtgcacagcgagttcgagagcttcgccgagaacaacttcacggagctccagagcgtgcagcccccgcagctgcagcagctctaccgccacatggagctggagcagatgcacgtcctcgatacccccatggtgccaccccatcccagtcttggccaccaggtctcctacctgccccggatgtgcctccagtacccatccctgtccccagcccagcccagctcagatgaggaggagggcgagcggcagagccccccactggaggtgtctgacggcgaggcggatggcctggagcccgggcctgggctcctgcctggggagacaggcagcaagaagaagatccgcctgtaccagttcctgttggacctgctccgcagcggcgacatgaaggacagcatctggtgggtggacaaggacaagggcaccttccagttctcgtccaagcacaaggaggcgctggcgcaccgctggggcatccagaagggcaaccgcaagaagatgacctaccagaagatggcgcgcgcgctgcgcaactacggcaagacgggcgaggtcaagaaggtgaagaagaagctcacctaccagttcagcggcgaagtgctgggccgcgggggcctggccgagcggcgccacccgccccacggatcgggagagggcaggggaagtcttctaacatgcggggacgtggaggaaaatcccggccccatggcttcagacagcatatttgagtcatttccttcgtacccacagtgcttcatgagagaatgcatacttggaatgaatccttctagagacgtccacgatgccagcacgagccgccgcttcacgccgccttccaccgcgctgagcccaggcaagatgagcgaggcgttgccgctgggcgccccggacgccggcgctgccctggccggcaagctgaggagcggcgaccgcagcatggtggaggtgctggccgaccacccgggcgagctggtgcgcaccgacagccccaacttcctctgctccgtgctgcctacgcactggcgctgcaacaagaccctgcccatcgctttcaaggtggtggccctaggggatgttccagatggcactctggtcactgtgatggctggcaatgatgaaaactactcggctgagctgagaaatgctaccgcagccatgaagaaccaggttgcaagatttaatgacctcaggtttgtcggtcgaagtggaagagggaaaagcttcactctgaccatcactgtcttcacaaacccaccgcaagtcgccacctaccacagagccatcaaaatcacagtggatgggccccgagaacctcgaagacatcggcagaaactagatgatcagaccaagcccgggagcttgtccttttccgagcggctcagtgaactggagcagctgcggcgcacagccatgagggtcagcccacaccacccagcccccacgcccaaccctcgtgcctccctgaaccactccactgcctttaaccctcagcctcagagtcagatgcaggatacaaggcagatccaaccatccccaccgtggtcctacgatcagtcctaccaatacctgggatccattgcctctccttctgtgcacccagcaacgcccatttcacctggacgtgccagcggcatgacaaccctctctgcagaactttccagtcgactctcaacggcacccgacctgacagcgttcagcgacccgcgccagttccccgcgctgccctccatctccgacccccgcatgcactatccaggcgccttcacctactccccgacgccggtcacctcgggcatcggcatcggcatgtcggccatgggctcggccacgcgctaccacacctacctgccgccgccctaccccggctcgtcgcaagcgcagggaggcccgttccaagccagctcgccctcctaccacctgtactacggcgcctcggccggctcctaccagttctccatggtgggcggcgagcgctcgccgccgcgcatcctgccgccctgcaccaacgcctccaccggctccgcgctgctcaaccccagcctcccgaaccagagcgacgtggtggaggccgagggcagccacagcaactccccgaccaacatggcgccctccgcgcgcctggaggaggccgtgtggaggccctacaccggttgagaattcgagctcggtacccggggatcctctagtcagctgacgcgtgctagcgcggccgcatcgataagcttgtcgacgatatctctagaggatcataatcagccataccacatttgtagaggttttacttgctttaaaaaacctcccacacctccccctgaacctgaaacataaaatgaatgcaattgttgttgttaacttgtttattgcagcttataatggttacaaataaagcaatagcatcacaaatttcacaaataaagcatttttttcactgccttgacagtactcttaagtcgacttactagggacaggattggtgacagaaaagccccatccttaggcctcctccttcctagtctcctgatattgggtctaacccccacctcctgttaggcagattccttatctggtgacacacccccatttcctggagccatctctctccttgccagaacctctaaggtttgcttacgatggagccagagaggatcctgggagggagagcttggcagggggtgggagggaagggggggatgcgtgacctgcccggttctcagtggccaccctgcgctaccctctcccagaacctgagctgctctgacgcggctgtctggtgcgtttcactgatcctggtgctgcagcttccttacacttcccaagaggagaagcagtttggaaaaacaaaatcagaataagttggtcctgagttctaactttggctcttcacctttctagtccccaatttatattgttcctccgtgcgtcagttttacctgtgagataaggccagtagccagccccgtcctggcagggctgtggtgaggaggggggtgtccgtgtggaaaactccctttgtgagaatggtgcgtcctaggtgttcaccaggtcgtggccgcctctactccctttctctttctccatccttctttccttaaagagtccccagtgctatctgggacatattcctccgcccagagcagggtcccgcttccctaaggccctgctctgggcttctgggtttgagtccttggcaagcccaggagaggcgctcaggcttccctgtcccccttcctcgtccaccatctcatgcccctggctctcctgccccttccctacaggggttcctggctctgctctaagcttggcgtaatcatggtcatagctgtttcctgtgtgaaattgttatccgctcacaattccacacaacatacgagccggaagcataaagtgtaaagcctggggtgcctaatgagtgagctaactcacattaattgcgttgcgctcactgcccgctttccagtcgggaaacctgtcgtgccagctgcattaatgaatcggccaacgcgcggggagaggcggtttgcgtattgggcgctcttccgcttcctcgctcactgactcgctgcgctcggtcgttcggctgcggcgagcggtatcagctcactcaaaggcggtaatacggttatccacagaatcaggggataacgcaggaaagaacatgtgagcaaaaggccagcaaaaggccaggaaccgtaaaaaggccgcgttgctggcgtttttccataggctccgcccccctgacgagcatcacaaaaatcgacgctcaagtcagaggtggcgaaacccgacaggactataaagataccaggcgtttccccctggaagctccctcgtgcgctctcctgttccgaccctgccgcttaccggatacctgtccgcctttctcccttcgggaagcgtggcgctttctcatagctcacgctgtaggtatctcagttcggtgtaggtcgttcgctccaagctgggctgtgtgcacgaaccccccgttcagcccgaccgctgcgccttatccggtaactatcgtcttgagtccaacccggtaagacacgacttatcgccactggcagcagccactggtaacaggattagcagagcgaggtatgtaggcggtgctacagagttcttgaagtggtggcctaactacggctacactagaagaacagtatttggtatctgcgctctgctgaagccagttaccttcggaaaaagagttggtagctcttgatccggcaaacaaaccaccgctggtagcggtggtttttttgtttgcaagcagcagattacgcgcagaaaaaaaggatctcaagaagatcctttgatcttttctacggggtctgacgctcagtggaacgaaaactcacgttaagggattttggtcatgagattatcaaaaaggatcttcacctagatccttttaaattaaaaatgaagttttaaatcaatctaaagtatatatgagtaaacttggtctgacagttaccaatgcttaatcagtgaggcacctatctcagcgatctgtctatttcgttcatccatagttgcctgactccccgtcgtgtagataactacgatacgggagggcttaccatctggccccagtgctgcaatgataccgcgagacccacgctcaccggctccagatttatcagcaataaaccagccagccggaagggccgagcgcagaagtggtcctgcaactttatccgcctccatccagtctattaattgttgccgggaagctagagtaagtagttcgccagttaatagtttgcgcaacgttgttgccattgctacaggcatcgtggtgtcacgctcgtcgtttggtatggcttcattcagctccggttcccaacgatcaaggcgagttacatgatcccccatgttgtgcaaaaaagcggttagctccttcggtcctccgatcgttgtcagaagtaagttggccgcagtgttatcactcatggttatggcagcactgcataattctcttactgtcatgccatccgtaagatgcttttctgtgactggtgagtactcaaccaagtcattctgagaatagtgtatgcggcgaccgagttgctcttgcccggcgtcaatacgggataataccgcgccacatagca

SEQ ID NO: 64 - DNA, 6746 bp, artificial sequence
  vector pUC_AAVS1_p-Resp-(PU.1)
tcgcgcgtttcggtgatgacggtgaaaacctctgacacatgcagctcccggagacggtcacagcttgtctgtaagcggatgccgggagcagacaagcccgtcagggcgcgtcagcgggtgttggcgggtgtcggggctggcttaactatgcggcatcagagcagattgtactgagagtgcaccatatgcggtgtgaaataccgcacagatgcgtaaggagaaaataccgcatcaggcgccattcgccattcaggctgcgcaactgttgggaagggcgatcggtgcgggcctcttcgctattacgccagctggcgaaagggggatgtgctgcaaggcgattaagttgggtaacgccagggttttcccagtcacgacgttgtaaaacgacggccagtgaattgtgctttctctgaccagcattctctcccctgggcctgtgccgctttctgtctgtagcttgtggcctgggtcacctctacggctggcccagatccttccctgccgcctccttcaggttccgtcttcctccactccctcttccccttgctctctgctgtgttgctgcccaaggatgctctttccggagcacttccttctcggcgctgcaccacgtgatgtcctctgagcggatcctccccgtgtctgggtcctctccgggcatctctcctccctcacccaaccccatgccgtcttcactcgctgggttcccttttccttctccttctggggcctgtgccatctctcgtttcttaggatggccttctccgacggatgtctcccttgcgtcccgcctccccttcttgtaggcctgcatcatcaccgtttttctggacaaccccaaagtaccccgtctccctggctttagccacctctccatcctcttgctttctttgcctggacaccccgttctcctgtggattcgggtcacctctcactcctttcatttgggcagctcccctaccccccttacctctctagtctgtgctagctcttccagccccctgtcatggcatcttccaggggtccgagagctcagctagtcttcttcctccaacccgggcccctatgtccacttcaggacagcatgtttgctgcctccagggatcctgtgtccccgagctgggaccaccttatattcccagggccggttaatgtggctctggttctgggtacttttatctgtcccctccaccccacagtggggcaagcttctgacctcttctcttcctcccacagggcctcgagagatctggcagcggagagggcagaggaagtcttctaacatgcggtgacgtggaggagaatcccggccctaggctcgagatgaccgagtacaagcccacggtgcgcctcgccacccgcgacgacgtccccagggccgtacgcaccctcgccgccgcgttcgccgactaccccgccacgcgccacaccgtcgatccggaccgccacatcgagcgggtcaccgagctgcaagaactcttcctcacgcgcgtcgggctcgacatcggcaaggtgtgggtcgcggacgacggcgccgcggtggcggtctggaccacgccggagagcgtcgaagcgggggcggtgttcgccgagatcggcccgcgcatggccgagttgagcggttcccggctggccgcgcagcaacagatggaaggcctcctggcgccgcaccggcccaaggagcccgcgtggttcctggccaccgtcggcgtctcgcccgaccaccagggcaagggtctgggcagcgccgtcgtgctccccggagtggaggcggccgagcgcgccggggtgcccgccttcctggagacctccgcgccccgcaacctccccttctacgagcggctcggcttcaccgtcaccgccgacgtcgaggtgcccgaaggaccgcgcacctggtgcatgacccgcaagcccggtgcctgatctagagggcccgtttaaacccgctgatcagcctcgactgtgccttctagttgccagccatctgttgtttgcccctcccccgtgccttccttgaccctggaaggtgccactcccactgtcctttcctaataaaatgaggaaattgcatcgcattgtctgagtaggtgtcattctattctggggggtggggtggggcaggacagcaagggggaggattgggaagacaatagcaggcatgctggggatgcggtgggctctatggtcactcgagtttactccctatcagtgatagagaacgtatgaagagtttactccctatcagtgatagagaacgtatgcagactttactccctatcagtgatagagaacgtataaggagtttactccctatcagtgatagagaacgtatgaccagtttactccctatcagtgatagagaacgtatctacagtttactccctatcagtgatagagaacgtatatccagtttactccctatcagtgatagagaacgtatgtcgaggtaggcgtgtacggtgggcgcctataaaagcagagctcgtttagtgaaccgtcagatcgcctggagcaattccacaacacttttgtcttatacttactagtgccaccatgttacaggcgtgcaaaatggaagggtttcccctcgtcccccctccatcagaagacctggtgccctatgacacggatctataccaacgccaaacgcacgagtattacccctatctcagcagtgatggggagagccatagcgaccattactgggacttccacccccaccacgtgcacagcgagttcgagagcttcgccgagaacaacttcacggagctccagagcgtgcagcccccgcagctgcagcagctctaccgccacatggagctggagcagatgcacgtcctcgatacccccatggtgccaccccatcccagtcttggccaccaggtctcctacctgccccggatgtgcctccagtacccatccctgtccccagcccagcccagctcagatgaggaggagggcgagcggcagagccccccactggaggtgtctgacggcgaggcggatggcctggagcccgggcctgggctcctgcctggggagacaggcagcaagaagaagatccgcctgtaccagttcctgttggacctgctccgcagcggcgacatgaaggacagcatctggtgggtggacaaggacaagggcaccttccagttctcgtccaagcacaaggaggcgctggcgcaccgctggggcatccagaagggcaaccgcaagaagatgacctaccagaagatggcgcgcgcgctgcgcaactacggcaagacgggcgaggtcaagaaggtgaagaagaagctcacctaccagttcagcggcgaagtgctgggccgcgggggcctggccgagcggcgccacccgccccactgagaattcgagctcggtacccggggatcctctagtcagctgacgcgtgctagcgcggccgcatcgataagcttgtcgacgatatctctagaggatcataatcagccataccacatttgtagaggttttacttgctttaaaaaacctcccacacctccccctgaacctgaaacataaaatgaatgcaattgttgttgttaacttgtttattgcagcttataatggttacaaataaagcaatagcatcacaaatttcacaaataaagcatttttttcactgccttgacagtactcttaagtcgacttactagggacaggattggtgacagaaaagccccatccttaggcctcctccttcctagtctcctgatattgggtctaacccccacctcctgttaggcagattccttatctggtgacacacccccatttcctggagccatctctctccttgccagaacctctaaggtttgcttacgatggagccagagaggatcctgggagggagagcttggcagggggtgggagggaagggggggatgcgtgacctgcccggttctcagtggccaccctgcgctaccctctcccagaacctgagctgctctgacgcggctgtctggtgcgtttcactgatcctggtgctgcagcttccttacacttcccaagaggagaagcagtttggaaaaacaaaatcagaataagttggtcctgagttctaactttggctcttcacctttctagtccccaatttatattgttcctccgtgcgtcagttttacctgtgagataaggccagtagccagccccgtcctggcagggctgtggtgaggaggggggtgtccgtgtggaaaactccctttgtgagaatggtgcgtcctaggtgttcaccaggtcgtggccgcctctactccctttctctttctccatccttctttccttaaagagtccccagtgctatctgggacatattcctccgcccagagcagggtcccgcttccctaaggccctgctctgggcttctgggtttgagtccttggcaagcccaggagaggcgctcaggcttccctgtcccccttcctcgtccaccatctcatgcccctggctctcctgccccttccctacaggggttcctggctctgctctaagcttggcgtaatcatggtcatagctgtttcctgtgtgaaattgttatccgctcacaattccacacaacatacgagccggaagcataaagtgtaaagcctggggtgcctaatgagtgagctaactcacattaattgcgttgcgctcactgcccgctttccagtcgggaaacctgtcgtgccagctgcattaatgaatcggccaacgcgcggggagaggcggtttgcgtattgggcgctcttccgcttcctcgctcactgactcgctgcgctcggtcgttcggctgcggcgagcggtatcagctcactcaaaggcggtaatacggttatccacagaatcaggggataacgcaggaaagaacatgtgagcaaaaggccagcaaaaggccaggaaccgtaaaaaggccgcgttgctggcgtttttccataggctccgcccccctgacgagcatcacaaaaatcgacgctcaagtcagaggtggcgaaacccgacaggactataaagataccaggcgtttccccctggaagctccctcgtgcgctctcctgttccgaccctgccgcttaccggatacctgtccgcctttctcccttcgggaagcgtggcgctttctcatagctcacgctgtaggtatctcagttcggtgtaggtcgttcgctccaagctgggctgtgtgcacgaaccccccgttcagcccgaccgctgcgccttatccggtaactatcgtcttgagtccaacccggtaagacacgacttatcgccactggcagcagccactggtaacaggattagcagagcgaggtatgtaggcggtgctacagagttcttgaagtggtggcctaactacggctacactagaagaacagtatttggtatctgcgctctgctgaagccagttaccttcggaaaaagagttggtagctcttgatccggcaaacaaaccaccgctggtagcggtggtttttttgtttgcaagcagcagattacgcgcagaaaaaaaggatctcaagaagatcctttgatcttttctacggggtctgacgctcagtggaacgaaaactcacgttaagggattttggtcatgagattatcaaaaaggatcttcacctagatccttttaaattaaaaatgaagttttaaatcaatctaaagtatatatgagtaaacttggtctgacagttaccaatgcttaatcagtgaggcacctatctcagcgatctgtctatttcgttcatccatagttgcctgactccccgtcgtgtagataactacgatacgggagggcttaccatctggccccagtgctgcaatgataccgcgagacccacgctcaccggctccagatttatcagcaataaaccagccagccggaagggccgagcgcagaagtggtcctgcaactttatccgcctccatccagtctattaattgttgccgggaagctagagtaagtagttcgccagttaatagtttgcgcaacgttgttgccattgctacaggcatcgtggtgtcacgctcgtcgtttggtatggcttcattcagctccggttcccaacgatcaaggcgagttacatgatcccccatgttgtgcaaaaaagcggttagctccttcggtcctccgatcgttgtcagaagtaagttggccgcagtgttatcactcatggttatggcagcactgcataattctcttactgtcatgccatccgtaagatgcttttctgtgactggtgagtactcaaccaagtcattctgagaatagtgtatgcggcgaccgagttgctcttgcccggcgtcaatacgggataataccgcgccacatagcagaactttaaaagtgctcatcattggaaaacgttcttcggggcgaaaactctcaaggatcttaccgctgttgagatccagttcgatgtaacccactcgtgcacccaactgatcttcagcatcttttactttcaccagcgtttctgggtgagcaaaaacaggaaggcaaaatgccgcaaaaaagggaataagggcgacacggaaatgttgaatactcatactcttcctttttcaatattattgaagcatttatcagggttattgtctcatgagcggatacatatttgaatgtatttagaaaaataaacaaataggggttccgcgcacatttccccgaaaagtgccacctgacgtctaagaaaccattattatcatgacattaacctataaaaataggcgtatcacgaggccctttcgtc

SEQ ID NO: 65 - DNA, 10781 bp, artificial sequence
  vector pUC_AAVS1_p-Resp-(PU.1-SALL1)
gaactttaaaagtgctcatcattggaaaacgttcttcggggcgaaaactctcaaggatcttaccgctgttgagatccagttcgatgtaacccactcgtgcacccaactgatcttcagcatcttttactttcaccagcgtttctgggtgagcaaaaacaggaaggcaaaatgccgcaaaaaagggaataagggcgacacggaaatgttgaatactcatactcttcctttttcaatattattgaagcatttatcagggttattgtctcatgagcggatacatatttgaatgtatttagaaaaataaacaaataggggttccgcgcacatttccccgaaaagtgccacctgacgtctaagaaaccattattatcatgacattaacctataaaaataggcgtatcacgaggccctttcgtctcgcgcgtttcggtgatgacggtgaaaacctctgacacatgcagctcccggagacggtcacagcttgtctgtaagcggatgccgggagcagacaagcccgtcagggcgcgtcagcgggtgttggcgggtgtcggggctggcttaactatgcggcatcagagcagattgtactgagagtgcaccatatgcggtgtgaaataccgcacagatgcgtaaggagaaaataccgcatcaggcgccattcgccattcaggctgcgcaactgttgggaagggcgatcggtgcgggcctcttcgctattacgccagctggcgaaagggggatgtgctgcaaggcgattaagttgggtaacgccagggttttcccagtcacgacgttgtaaaacgacggccagtgaattgtgctttctctgaccagcattctctcccctgggcctgtgccgctttctgtctgtagcttgtggcctgggtcacctctacggctggcccagatccttccctgccgcctccttcaggttccgtcttcctccactccctcttccccttgctctctgctgtgttgctgcccaaggatgctctttccggagcacttccttctcggcgctgcaccacgtgatgtcctctgagcggatcctccccgtgtctgggtcctctccgggcatctctcctccctcacccaaccccatgccgtcttcactcgctgggttcccttttccttctccttctggggcctgtgccatctctcgtttcttaggatggccttctccgacggatgtctcccttgcgtcccgcctccccttcttgtaggcctgcatcatcaccgtttttctggacaaccccaaagtaccccgtctccctggctttagccacctctccatcctcttgctttctttgcctggacaccccgttctcctgtggattcgggtcacctctcactcctttcatttgggcagctcccctaccccccttacctctctagtctgtgctagctcttccagccccctgtcatggcatcttccaggggtccgagagctcagctagtcttcttcctccaacccgggcccctatgtccacttcaggacagcatgtttgctgcctccagggatcctgtgtccccgagctgggaccaccttatattcccagggccggttaatgtggctctggttctgggtacttttatctgtcccctccaccccacagtggggcaagcttctgacctcttctcttcctcccacagggcctcgagagatctggcagcggagagggcagaggaagtcttctaacatgcggtgacgtggaggagaatcccggccctaggctcgagatgaccgagtacaagcccacggtgcgcctcgccacccgcgacgacgtccccagggccgtacgcaccctcgccgccgcgttcgccgactaccccgccacgcgccacaccgtcgatccggaccgccacatcgagcgggtcaccgagctgcaagaactcttcctcacgcgcgtcgggctcgacatcggcaaggtgtgggtcgcggacgacggcgccgcggtggcggtctggaccacgccggagagcgtcgaagcgggggcggtgttcgccgagatcggcccgcgcatggccgagttgagcggttcccggctggccgcgcagcaacagatggaaggcctcctggcgccgcaccggcccaaggagcccgcgtggttcctggccaccgtcggcgtctcgcccgaccaccagggcaagggtctgggcagcgccgtcgtgctccccggagtggaggcggccgagcgcgccggggtgcccgccttcctggagacctccgcgccccgcaacctccccttctacgagcggctcggcttcaccgtcaccgccgacgtcgaggtgcccgaaggaccgcgcacctggtgcatgacccgcaagcccggtgcctgatctagagggcccgtttaaacccgctgatcagcctcgactgtgccttctagttgccagccatctgttgtttgcccctcccccgtgccttccttgaccctggaaggtgccactcccactgtcctttcctaataaaatgaggaaattgcatcgcattgtctgagtaggtgtcattctattctggggggtggggtggggcaggacagcaagggggaggattgggaagacaatagcaggcatgctggggatgcggtgggctctatggtcactcgagtttactccctatcagtgatagagaacgtatgaagagtttactccctatcagtgatagagaacgtatgcagactttactccctatcagtgatagagaacgtataaggagtttactccctatcagtgatagagaacgtatgaccagtttactccctatcagtgatagagaacgtatctacagtttactccctatcagtgatagagaacgtatatccagtttactccctatcagtgatagagaacgtatgtcgaggtaggcgtgtacggtgggcgcctataaaagcagagctcgtttagtgaaccgtcagatcgcctggagcaattccacaacacttttgtcttatacttactagtgccaccatgttacaggcgtgcaaaatggaagggtttcccctcgtcccccctccatcagaagacctggtgccctatgacacggatctataccaacgccaaacgcacgagtattacccctatctcagcagtgatggggagagccatagcgaccattactgggacttccacccccaccacgtgcacagcgagttcgagagcttcgccgagaacaacttcacggagctccagagcgtgcagcccccgcagctgcagcagctctaccgccacatggagctggagcagatgcacgtcctcgatacccccatggtgccaccccatcccagtcttggccaccaggtctcctacctgccccggatgtgcctccagtacccatccctgtccccagcccagcccagctcagatgaggaggagggcgagcggcagagccccccactggaggtgtctgacggcgaggcggatggcctggagcccgggcctgggctcctgcctggggagacaggcagcaagaagaagatccgcctgtaccagttcctgttggacctgctccgcagcggcgacatgaaggacagcatctggtgggtggacaaggacaagggcaccttccagttctcgtccaagcacaaggaggcgctggcgcaccgctggggcatccagaagggcaaccgcaagaagatgacctaccagaagatggcgcgcgcgctgcgcaactacggcaagacgggcgaggtcaagaaggtgaagaagaagctcacctaccagttcagcggcgaagtgctgggccgcgggggcctggccgagcggcgccacccgccccacggatcgggagagggcaggggaagtcttctaacatgcggggacgtggaggaaaatcccggccccatgtcgcggaggaagcaagcgaagcctcaacatttccaatccgaccccgaagtggcctcgctcccccggcgagatggagacacagaaaagggtcaaccgagtcgccctactaagagcaaggatgcccacgtctgtggccggtgctgtgccgagttctttgaattatcagatcttctgctccacaagaagaactgtactaaaaatcaattagttttaatcgtaaatgaaaatccagcctccccacccgaaaccttctcccccagcccccctcctgataatcctgatgaacaaatgaatgacacagttaacaaaacagatcaagtggactgcagcgacctttcagaacacaacggacttgacagggaagagtccatggaggtggaggccccggttgctaacaaaagcggcagcggcacttccagcggcagccacagcagtaccgccccaagcagcagcagcagcagcagcagcagcagcggcggcggcggcagctcctccacaggtacctcagcgatcacaacctctctacctcaactcggggacctgacaacactgggcaacttctccgtaatcaacagcaacgtcatcatcgagaacctccagagcaccaaggtggcggtggcccagttctcccaggaagcgaggtgcggcggggcctctgggggcaagctggccgtcccagccctcatggaacaactcctagctctgcagcagcagcagatccaccagctgcaattgatcgaacagattcgtcaccaaatattgctgttggcttctcagaatgcagacttgccaacatcttctagtccttctcaaggtactttacgaacatctgccaaccccttgtccacgctaagttcccatttatctcagcagctggcagcagcagctggattggcacagagcctcgccagccaatctgccagcattagtggtgtgaaacagctacccccaatccagctacctcagagcagttctggcaacaccatcattccatccaacagcggctcttctcccaatatgaacatattggcagcggcagttaccaccccgtcctctgaaaaagtggcttcaagtgctggggcctcccatgtcagcaacccagcggtctcatcatcgtcctcaccagcttttgcaataagcagtttattaagtcctgcgtctaatccacttctacctcagcaagcctccgctaactcggttttccccagccctttgcccaacatcggaacaactgcagaggatttaaactccttgtctgccttggcccagcaaagaaaaagcaagccaccaaatgtcactgcctttgaagcgaaaagtacttccgatgaggcattcttcaaacacaagtgcaggttctgcgcgaaggtctttgggagtgacagtgccttgcagatccacttgcgttcccataccggagagaggccattcaagtgcaacatctgcgggaacaggttctccaccaaggggaatctgaaagtccactttcagcgccacaaagagaaataccctcatatccagatgaacccctatcctgtgcctgagcatttggacaatatccccacgagtactggcatcccatatggcatgtccatccctccagagaagccagtcaccagctggctagacaccaaaccagtcctgcctactctgaccacttcagtcggcctgccgttgcccccaaccctcccaagcctcatacccttcatcaagacggaagagccagcccccatccccatcagccattctgccaccagccccccaggctcagtcaaaagtgactccgggggccctgagtcagccacaagaaacctaggtgggctcccagaggaagccgaagggtccactctgccaccctctggtggcaaaagcgaagagagtggcatggtcaccaactcagtcccgacggcgagcagtagcgtcctgagctccccagcggcagactgcggccccgcgggcagtgccaccaccttcaccaaccctttgttgccgctcatgtccgagcagttcaaggccaagtttccttttgggggactcctggactcagctcaggcatcagagacgtccaagcttcagcaactggtagaaaacattgacaagaaggccactgaccccaatgagtgcatcatctgccaccgggttctcagctgccagagcgccttgaaaatgcactacaggacacacactggggagaggccctttaagtgtaagatctgtggccgggctttcaccacgaaagggaatcttaaaacccactacagtgtccatcgtgctatgcccccgctcagagtccagcattcctgccccatctgccagaagaagttcacgaacgctgtggtcctgcagcagcacatccgaatgcatatgggaggccagatccccaacaccccagtccccgacagctactctgagtccatggagtctgacacaggttcctttgatgagaaaaattttgatgacctagacaacttctctgatgaaaacatggaagactgtcctgagggcagcatccctgatacacctaagtctgcagacgcctcccaagacagcttatcctcttcgcctttgcccctcgagatgtcgagcatcgctgctttggaaaatcagatgaagatgatcaatgctggcctggcagagcagctacaggccagcctgaagtcagtggagaatgggtccatcgagggggatgtcctgaccaatgattcatcctcagtgggtggtgacatggaaagccaaagtgctggcagcccagccatctcagagtctacctcttccatgcaggctctgtccccgtccaacagcacgcaggagttccacaagtcacccagcattgaggagaaaccacagagagcggtcccaagcgagtttgccaatggtttgtctcccaccccagtgaatggtggggctttggatttgacatctagtcacgcagagaaaatcatcaaagaagattctttggggatcctcttcccttttagagaccggggtaaatttaaaaacactgcttgtgacatttgtggcaaaacatttgcttgtcagagtgccttggacattcactatagaagtcataccaaagagagaccatttatttgcacagtttgcaatcgtggcttttccacaaagggtaatttgaagcagcacatgttgacacatcagatgcgagatctgccatcccagctctttgagcccagttccaaccttggccccaatcagaactcagcggtgattcccgccaactcgttgtcatctctcatcaagacagaggtcaacggcttcgtgcatgtttctcctcaggacagtaaggacacccccaccagtcacgtcccgtctgggcctctgtcttcctctgccacatccccagttctgctccctgctctgcccaggagaactcccaagcagcactactgcaacacatgtggcaaaaccttctcctcatcgagtgccctgcagattcacgagagaactcacactggagagaaaccctttgcttgcactatttgtggaagagctttcacgactaaaggcaatcttaaggtacacatgggcactcacatgtggaatagcacccctgcacgacggggtcggcggctctctgtggatggccccatgacatttctaggaggcaatcccgtcaagttcccagaaatgttccagaaggatttggcggcaagatcaggaagtggggatccttccagcttctggaatcagtatgcagcagcgctctccaacgggctggcgatgaaggccaacgagatctccgtcattcagaacggtggcatccctccaattcctggaagcctcggcagtgggaacagctcacctgttagtgggctgacgggaaacctggagaggctccagaactcagagcccaatgctcccctggccggcctggagaaaatggcaagcagtgagaacggaaccaacttccgcttcacccgcttcgtggaggacagcaaggagatcgtcacgagttaagaattcgagctcggtacccggggatcctctagtcagctgacgcgtgctagcgcggccgcatcgataagcttgtcgacgatatctctagaggatcataatcagccataccacatttgtagaggttttacttgctttaaaaaacctcccacacctccccctgaacctgaaacataaaatgaatgcaattgttgttgttaacttgtttattgcagcttataatggttacaaataaagcaatagcatcacaaatttcacaaataaagcatttttttcactgccttgacagtactcttaagtcgacttactagggacaggattggtgacagaaaagccccatccttaggcctcctccttcctagtctcctgatattgggtctaacccccacctcctgttaggcagattccttatctggtgacacacccccatttcctggagccatctctctccttgccagaacctctaaggtttgcttacgatggagccagagaggatcctgggagggagagcttggcagggggtgggagggaagggggggatgcgtgacctgcccggttctcagtggccaccctgcgctaccctctcccagaacctgagctgctctgacgcggctgtctggtgcgtttcactgatcctggtgctgcagcttccttacacttcccaagaggagaagcagtttggaaaaacaaaatcagaataagttggtcctgagttctaactttggctcttcacctttctagtccccaatttatattgttcctccgtgcgtcagttttacctgtgagataaggccagtagccagccccgtcctggcagggctgtggtgaggaggggggtgtccgtgtggaaaactccctttgtgagaatggtgcgtcctaggtgttcaccaggtcgtggccgcctctactccctttctctttctccatccttctttccttaaagagtccccagtgctatctgggacatattcctccgcccagagcagggtcccgcttccctaaggccctgctctgggcttctgggtttgagtccttggcaagcccaggagaggcgctcaggcttccctgtcccccttcctcgtccaccatctcatgcccctggctctcctgccccttccctacaggggttcctggctctgctctaagcttggcgtaatcatggtcatagctgtttcctgtgtgaaattgttatccgctcacaattccacacaacatacgagccggaagcataaagtgtaaagcctggggtgcctaatgagtgagctaactcacattaattgcgttgcgctcactgcccgctttccagtcgggaaacctgtcgtgccagctgcattaatgaatcggccaacgcgcggggagaggcggtttgcgtattgggcgctcttccgcttcctcgctcactgactcgctgcgctcggtcgttcggctgcggcgagcggtatcagctcactcaaaggcggtaatacggttatccacagaatcaggggataacgcaggaaagaacatgtgagcaaaaggccagcaaaaggccaggaaccgtaaaaaggccgcgttgctggcgtttttccataggctccgcccccctgacgagcatcacaaaaatcgacgctcaagtcagaggtggcgaaacccgacaggactataaagataccaggcgtttccccctggaagctccctcgtgcgctctcctgttccgaccctgccgcttaccggatacctgtccgcctttctcccttcgggaagcgtggcgctttctcatagctcacgctgtaggtatctcagttcggtgtaggtcgttcgctccaagctgggctgtgtgcacgaaccccccgttcagcccgaccgctgcgccttatccggtaactatcgtcttgagtccaacccggtaagacacgacttatcgccactggcagcagccactggtaacaggattagcagagcgaggtatgtaggcggtgctacagagttcttgaagtggtggcctaactacggctacactagaagaacagtatttggtatctgcgctctgctgaagccagttaccttcggaaaaagagttggtagctcttgatccggcaaacaaaccaccgctggtagcggtggtttttttgtttgcaagcagcagattacgcgcagaaaaaaaggatctcaagaagatcctttgatcttttctacggggtctgacgctcagtggaacgaaaactcacgttaagggattttggtcatgagattatcaaaaaggatcttcacctagatccttttaaattaaaaatgaagttttaaatcaatctaaagtatatatgagtaaacttggtctgacagttaccaatgcttaatcagtgaggcacctatctcagcgatctgtctatttcgttcatccatagttgcctgactccccgtcgtgtagataactacgatacgggagggcttaccatctggccccagtgctgcaatgataccgcgagacccacgctcaccggctccagatttatcagcaataaaccagccagccggaagggccgagcgcagaagtggtcctgcaactttatccgcctccatccagtctattaattgttgccgggaagctagagtaagtagttcgccagttaatagtttgcgcaacgttgttgccattgctacaggcatcgtggtgtcacgctcgtcgtttggtatggcttcattcagctccggttcccaacgatcaaggcgagttacatgatcccccatgttgtgcaaaaaagcggttagctccttcggtcctccgatcgttgtcagaagtaagttggccgcagtgttatcactcatggttatggcagcactgcataattctcttactgtcatgccatccgtaagatgcttttctgtgactggtgagtactcaaccaagtcattctgagaatagtgtatgcggcgaccgagttgctcttgcccggcgtcaatacgggataataccgcgccacatagca

SEQ ID NO: 66 - DNA, 8508 bp, artificial sequence
  ROSA26-guide A_Cas9n
gagggcctatttcccatgattccttcatatttgcatatacgatacaaggctgttagagagataattggaattaatttgactgtaaacacaaagatattagtacaaaatacgtgacgtagaaagtaataatttcttgggtagtttgcagttttaaaattatgttttaaaatggactatcatatgcttaccgtaacttgaaagtatttcgatttcttggctttatatatcttgtggaaaggacgaaacaccgtcgagtcgcttctcgattagttttagagctagaaatagcaagttaaaataaggctagtccgttatcaacttgaaaaagtggcaccgagtcggtgcttttttgttttagagctagaaatagcaagttaaaataaggctagtccgtttttagcgcgtgcgccaattctgcagacaaatggctctagaggtacccgttacataacttacggtaaatggcccgcctggctgaccgcccaacgacccccgcccattgacgtcaatagtaacgccaatagggactttccattgacgtcaatgggtggagtatttacggtaaactgcccacttggcagtacatcaagtgtatcatatgccaagtacgccccctattgacgtcaatgacggtaaatggcccgcctggcattgtgcccagtacatgaccttatgggactttcctacttggcagtacatctacgtattagtcatcgctattaccatggtcgaggtgagccccacgttctgcttcactctccccatctcccccccctccccacccccaattttgtatttatttattttttaattattttgtgcagcgatgggggcggggggggggggggggcgcgcgccaggcggggcggggcggggcgaggggcggggcggggcgaggcggagaggtgcggcggcagccaatcagagcggcgcgctccgaaagtttccttttatggcgaggcggcggcggcggcggccctataaaaagcgaagcgcgcggcgggcgggagtcgctgcgacgctgccttcgccccgtgccccgctccgccgccgcctcgcgccgcccgccccggctctgactgaccgcgttactcccacaggtgagcgggcgggacggcccttctcctccgggctgtaattagctgagcaagaggtaagggtttaagggatggttggttggtggggtattaatgtttaattacctggagcacctgcctgaaatcactttttttcaggttggaccggtgccaccatggactataaggaccacgacggagactacaaggatcatgatattgattacaaagacgatgacgataagatggccccaaagaagaagcggaaggtcggtatccacggagtcccagcagccgacaagaagtacagcatcggcctggccatcggcaccaactctgtgggctgggccgtgatcaccgacgagtacaaggtgcccagcaagaaattcaaggtgctgggcaacaccgaccggcacagcatcaagaagaacctgatcggagccctgctgttcgacagcggcgaaacagccgaggccacccggctgaagagaaccgccagaagaagatacaccagacggaagaaccggatctgctatctgcaagagatcttcagcaacgagatggccaaggtggacgacagcttcttccacagactggaagagtccttcctggtggaagaggataagaagcacgagcggcaccccatcttcggcaacatcgtggacgaggtggcctaccacgagaagtaccccaccatctaccacctgagaaagaaactggtggacagcaccgacaaggccgacctgcggctgatctatctggccctggcccacatgatcaagttccggggccacttcctgatcgagggcgacctgaaccccgacaacagcgacgtggacaagctgttcatccagctggtgcagacctacaaccagctgttcgaggaaaaccccatcaacgccagcggcgtggacgccaaggccatcctgtctgccagactgagcaagagcagacggctggaaaatctgatcgcccagctgcccggcgagaagaagaatggcctgttcggcaacctgattgccctgagcctgggcctgacccccaacttcaagagcaacttcgacctggccgaggatgccaaactgcagctgagcaaggacacctacgacgacgacctggacaacctgctggcccagatcggcgaccagtacgccgacctgtttctggccgccaagaacctgtccgacgccatcctgctgagcgacatcctgagagtgaacaccgagatcaccaaggcccccctgagcgcctctatgatcaagagatacgacgagcaccaccaggacctgaccctgctgaaagctctcgtgcggcagcagctgcctgagaagtacaaagagattttcttcgaccagagcaagaacggctacgccggctacattgacggcggagccagccaggaagagttctacaagttcatcaagcccatcctggaaaagatggacggcaccgaggaactgctcgtgaagctgaacagagaggacctgctgcggaagcagcggaccttcgacaacggcagcatcccccaccagatccacctgggagagctgcacgccattctgcggcggcaggaagatttttacccattcctgaaggacaaccgggaaaagatcgagaagatcctgaccttccgcatcccctactacgtgggccctctggccaggggaaacagcagattcgcctggatgaccagaaagagcgaggaaaccatcaccccctggaacttcgaggaagtggtggacaagggcgcttccgcccagagcttcatcgagcggatgaccaacttcgataagaacctgcccaacgagaaggtgctgcccaagcacagcctgctgtacgagtacttcaccgtgtataacgagctgaccaaagtgaaatacgtgaccgagggaatgagaaagcccgccttcctgagcggcgagcagaaaaaggccatcgtggacctgctgttcaagaccaaccggaaagtgaccgtgaagcagctgaaagaggactacttcaagaaaatcgagtgcttcgactccgtggaaatctccggcgtggaagatcggttcaacgcctccctgggcacataccacgatctgctgaaaattatcaaggacaaggacttcctggacaatgaggaaaacgaggacattctggaagatatcgtgctgaccctgacactgtttgaggacagagagatgatcgaggaacggctgaaaacctatgcccacctgttcgacgacaaagtgatgaagcagctgaagcggcggagatacaccggctggggcaggctgagccggaagctgatcaacggcatccgggacaagcagtccggcaagacaatcctggatttcctgaagtccgacggcttcgccaacagaaacttcatgcagctgatccacgacgacagcctgacctttaaagaggacatccagaaagcccaggtgtccggccagggcgatagcctgcacgagcacattgccaatctggccggcagccccgccattaagaagggcatcctgcagacagtgaaggtggtggacgagctcgtgaaagtgatgggccggcacaagcccgagaacatcgtgatcgaaatggccagagagaaccagaccacccagaagggacagaagaacagccgcgagagaatgaagcggatcgaagagggcatcaaagagctgggcagccagatcctgaaagaacaccccgtggaaaacacccagctgcagaacgagaagctgtacctgtactacctgcagaatgggcgggatatgtacgtggaccaggaactggacatcaaccggctgtccgactacgatgtggaccatatcgtgcctcagagctttctgaaggacgactccatcgacaacaaggtgctgaccagaagcgacaagaaccggggcaagagcgacaacgtgccctccgaagaggtcgtgaagaagatgaagaactactggcggcagctgctgaacgccaagctgattacccagagaaagttcgacaatctgaccaaggccgagagaggcggcctgagcgaactggataaggccggcttcatcaagagacagctggtggaaacccggcagatcacaaagcacgtggcacagatcctggactcccggatgaacactaagtacgacgagaatgacaagctgatccgggaagtgaaagtgatcaccctgaagtccaagctggtgtccgatttccggaaggatttccagttttacaaagtgcgcgagatcaacaactaccaccacgcccacgacgcctacctgaacgccgtcgtgggaaccgccctgatcaaaaagtaccctaagctggaaagcgagttcgtgtacggcgactacaaggtgtacgacgtgcggaagatgatcgccaagagcgagcaggaaatcggcaaggctaccgccaagtacttcttctacagcaacatcatgaactttttcaagaccgagattaccctggccaacggcgagatccggaagcggcctctgatcgagacaaacggcgaaaccggggagatcgtgtgggataagggccgggattttgccaccgtgcggaaagtgctgagcatgccccaagtgaatatcgtgaaaaagaccgaggtgcagacaggcggcttcagcaaagagtctatcctgcccaagaggaacagcgataagctgatcgccagaaagaaggactgggaccctaagaagtacggcggcttcgacagccccaccgtggcctattctgtgctggtggtggccaaagtggaaaagggcaagtccaagaaactgaagagtgtgaaagagctgctggggatcaccatcatggaaagaagcagcttcgagaagaatcccatcgactttctggaagccaagggctacaaagaagtgaaaaaggacctgatcatcaagctgcctaagtactccctgttcgagctggaaaacggccggaagagaatgctggcctctgccggcgaactgcagaagggaaacgaactggccctgccctccaaatatgtgaacttcctgtacctggccagccactatgagaagctgaagggctcccccgaggataatgagcagaaacagctgtttgtggaacagcacaagcactacctggacgagatcatcgagcagatcagcgagttctccaagagagtgatcctggccgacgctaatctggacaaagtgctgtccgcctacaacaagcaccgggataagcccatcagagagcaggccgagaatatcatccacctgtttaccctgaccaatctgggagcccctgccgccttcaagtactttgacaccaccatcgaccggaagaggtacaccagcaccaaagaggtgctggacgccaccctgatccaccagagcatcaccggcctgtacgagacacggatcgacctgtctcagctgggaggcgacaaaaggccggcggccacgaaaaaggccggccaggcaaaaaagaaaaagtaagaattcctagagctcgctgatcagcctcgactgtgccttctagttgccagccatctgttgtttgcccctcccccgtgccttccttgaccctggaaggtgccactcccactgtcctttcctaataaaatgaggaaattgcatcgcattgtctgagtaggtgtcattctattctggggggtggggtggggcaggacagcaagggggaggattgggaagagaatagcaggcatgctggggagcggccgcaggaacccctagtgatggagttggccactccctctctgcgcgctcgctcgctcactgaggccgggcgaccaaaggtcgcccgacgcccgggctttgcccgggcggcctcagtgagcgagcgagcgcgcagctgcctgcaggggcgcctgatgcggtattttctccttacgcatctgtgcggtatttcacaccgcatacgtcaaagcaaccatagtacgcgccctgtagcggcgcattaagcgcggcgggtgtggtggttacgcgcagcgtgaccgctacacttgccagcgccctagcgcccgctcctttcgctttcttcccttcctttctcgccacgttcgccggctttccccgtcaagctctaaatcgggggctccctttagggttccgatttagtgctttacggcacctcgaccccaaaaaacttgatttgggtgatggttcacgtagtgggccatcgccctgatagacggtttttcgccctttgacgttggagtccacgttctttaatagtggactcttgttccaaactggaacaacactcaaccctatctcgggctattcttttgatttataagggattttgccgatttcggcctattggttaaaaaatgagctgatttaacaaaaatttaacgcgaattttaacaaaatattaacgtttacaattttatggtgcactctcagtacaatctgctctgatgccgcatagttaagccagccccgacacccgccaacacccgctgacgcgccctgacgggcttgtctgctcccggcatccgcttacagacaagctgtgaccgtctccgggagctgcatgtgtcagaggttttcaccgtcatcaccgaaacgcgcgagacgaaagggcctcgtgatacgcctatttttataggttaatgtcatgataataatggtttcttagacgtcaggtggcacttttcggggaaatgtgcgcggaacccctatttgtttatttttctaaatacattcaaatatgtatccgctcatgagacaataaccctgataaatgcttcaataatattgaaaaaggaagagtatgagtattcaacatttccgtgtcgcccttattcccttttttgcggcattttgccttcctgtttttgctcacccagaaacgctggtgaaagtaaaagatgctgaagatcagttgggtgcacgagtgggttacatcgaactggatctcaacagcggtaagatccttgagagttttcgccccgaagaacgttttccaatgatgagcacttttaaagttctgctatgtggcgcggtattatcccgtattgacgccgggcaagagcaactcggtcgccgcatacactattctcagaatgacttggttgagtactcaccagtcacagaaaagcatcttacggatggcatgacagtaagagaattatgcagtgctgccataaccatgagtgataacactgcggccaacttacttctgacaacgatcggaggaccgaaggagctaaccgcttttttgcacaacatgggggatcatgtaactcgccttgatcgttgggaaccggagctgaatgaagccataccaaacgacgagcgtgacaccacgatgcctgtagcaatggcaacaacgttgcgcaaactattaactggcgaactacttactctagcttcccggcaacaattaatagactggatggaggcggataaagttgcaggaccacttctgcgctcggcccttccggctggctggtttattgctgataaatctggagccggtgagcgtggaagccgcggtatcattgcagcactggggccagatggtaagccctcccgtatcgtagttatctacacgacggggagtcaggcaactatggatgaacgaaatagacagatcgctgagataggtgcctcactgattaagcattggtaactgtcagaccaagtttactcatatatactttagattgatttaaaacttcatttttaatttaaaaggatctaggtgaagatcctttttgataatctcatgaccaaaatcccttaacgtgagttttcgttccactgagcgtcagaccccgtagaaaagatcaaaggatcttcttgagatcctttttttctgcgcgtaatctgctgcttgcaaacaaaaaaaccaccgctaccagcggtggtttgtttgccggatcaagagctaccaactctttttccgaaggtaactggcttcagcagagcgcagataccaaatactgtccttctagtgtagccgtagttaggccaccacttcaagaactctgtagcaccgcctacatacctcgctctgctaatcctgttaccagtggctgctgccagtggcgataagtcgtgtcttaccgggttggactcaagacgatagttaccggataaggcgcagcggtcgggctgaacggggggttcgtgcacacagcccagcttggagcgaacgacctacaccgaactgagatacctacagcgtgagctatgagaaagcgccacgcttcccgaagggagaaaggcggacaggtatccggtaagcggcagggtcggaacaggagagcgcacgagggagcttccagggggaaacgcctggtatctttatagtcctgtcgggtttcgccacctctgacttgagcgtcgatttttgtgatgctcgtcaggggggcggagcctatggaaaaacgccagcaacgcggcctttttacggttcctggccttttgctggccttttgctcacatgt

SEQ ID NO: 67 - DNA, 8508 bp, artificial sequence
  ROSA26-guide B_Cas9n
gagggcctatttcccatgattccttcatatttgcatatacgatacaaggctgttagagagataattggaattaatttgactgtaaacacaaagatattagtacaaaatacgtgacgtagaaagtaataatttcttgggtagtttgcagttttaaaattatgttttaaaatggactatcatatgcttaccgtaacttgaaagtatttcgatttcttggctttatatatcttgtggaaaggacgaaacaccggcgatgacgagatcacgcggttttagagctagaaatagcaagttaaaataaggctagtccgttatcaacttgaaaaagtggcaccgagtcggtgcttttttgttttagagctagaaatagcaagttaaaataaggctagtccgtttttagcgcgtgcgccaattctgcagacaaatggctctagaggtacccgttacataacttacggtaaatggcccgcctggctgaccgcccaacgacccccgcccattgacgtcaatagtaacgccaatagggactttccattgacgtcaatgggtggagtatttacggtaaactgcccacttggcagtacatcaagtgtatcatatgccaagtacgccccctattgacgtcaatgacggtaaatggcccgcctggcattgtgcccagtacatgaccttatgggactttcctacttggcagtacatctacgtattagtcatcgctattaccatggtcgaggtgagccccacgttctgcttcactctccccatctcccccccctccccacccccaattttgtatttatttattttttaattattttgtgcagcgatgggggcggggggggggggggggcgcgcgccaggcggggcggggcggggcgaggggcggggcggggcgaggcggagaggtgcggcggcagccaatcagagcggcgcgctccgaaagtttccttttatggcgaggcggcggcggcggcggccctataaaaagcgaagcgcgcggcgggcgggagtcgctgcgacgctgccttcgccccgtgccccgctccgccgccgcctcgcgccgcccgccccggctctgactgaccgcgttactcccacaggtgagcgggcgggacggcccttctcctccgggctgtaattagctgagcaagaggtaagggtttaagggatggttggttggtggggtattaatgtttaattacctggagcacctgcctgaaatcactttttttcaggttggaccggtgccaccatggactataaggaccacgacggagactacaaggatcatgatattgattacaaagacgatgacgataagatggccccaaagaagaagcggaaggtcggtatccacggagtcccagcagccgacaagaagtacagcatcggcctggccatcggcaccaactctgtgggctgggccgtgatcaccgacgagtacaaggtgcccagcaagaaattcaaggtgctgggcaacaccgaccggcacagcatcaagaagaacctgatcggagccctgctgttcgacagcggcgaaacagccgaggccacccggctgaagagaaccgccagaagaagatacaccagacggaagaaccggatctgctatctgcaagagatcttcagcaacgagatggccaaggtggacgacagcttcttccacagactggaagagtccttcctggtggaagaggataagaagcacgagcggcaccccatcttcggcaacatcgtggacgaggtggcctaccacgagaagtaccccaccatctaccacctgagaaagaaactggtggacagcaccgacaaggccgacctgcggctgatctatctggccctggcccacatgatcaagttccggggccacttcctgatcgagggcgacctgaaccccgacaacagcgacgtggacaagctgttcatccagctggtgcagacctacaaccagctgttcgaggaaaaccccatcaacgccagcggcgtggacgccaaggccatcctgtctgccagactgagcaagagcagacggctggaaaatctgatcgcccagctgcccggcgagaagaagaatggcctgttcggcaacctgattgccctgagcctgggcctgacccccaacttcaagagcaacttcgacctggccgaggatgccaaactgcagctgagcaaggacacctacgacgacgacctggacaacctgctggcccagatcggcgaccagtacgccgacctgtttctggccgccaagaacctgtccgacgccatcctgctgagcgacatcctgagagtgaacaccgagatcaccaaggcccccctgagcgcctctatgatcaagagatacgacgagcaccaccaggacctgaccctgctgaaagctctcgtgcggcagcagctgcctgagaagtacaaagagattttcttcgaccagagcaagaacggctacgccggctacattgacggcggagccagccaggaagagttctacaagttcatcaagcccatcctggaaaagatggacggcaccgaggaactgctcgtgaagctgaacagagaggacctgctgcggaagcagcggaccttcgacaacggcagcatcccccaccagatccacctgggagagctgcacgccattctgcggcggcaggaagatttttacccattcctgaaggacaaccgggaaaagatcgagaagatcctgaccttccgcatcccctactacgtgggccctctggccaggggaaacagcagattcgcctggatgaccagaaagagcgaggaaaccatcaccccctggaacttcgaggaagtggtggacaagggcgcttccgcccagagcttcatcgagcggatgaccaacttcgataagaacctgcccaacgagaaggtgctgcccaagcacagcctgctgtacgagtacttcaccgtgtataacgagctgaccaaagtgaaatacgtgaccgagggaatgagaaagcccgccttcctgagcggcgagcagaaaaaggccatcgtggacctgctgttcaagaccaaccggaaagtgaccgtgaagcagctgaaagaggactacttcaagaaaatcgagtgcttcgactccgtggaaatctccggcgtggaagatcggttcaacgcctccctgggcacataccacgatctgctgaaaattatcaaggacaaggacttcctggacaatgaggaaaacgaggacattctggaagatatcgtgctgaccctgacactgtttgaggacagagagatgatcgaggaacggctgaaaacctatgcccacctgttcgacgacaaagtgatgaagcagctgaagcggcggagatacaccggctggggcaggctgagccggaagctgatcaacggcatccgggacaagcagtccggcaagacaatcctggatttcctgaagtccgacggcttcgccaacagaaacttcatgcagctgatccacgacgacagcctgacctttaaagaggacatccagaaagcccaggtgtccggccagggcgatagcctgcacgagcacattgccaatctggccggcagccccgccattaagaagggcatcctgcagacagtgaaggtggtggacgagctcgtgaaagtgatgggccggcacaagcccgagaacatcgtgatcgaaatggccagagagaaccagaccacccagaagggacagaagaacagccgcgagagaatgaagcggatcgaagagggcatcaaagagctgggcagccagatcctgaaagaacaccccgtggaaaacacccagctgcagaacgagaagctgtacctgtactacctgcagaatgggcgggatatgtacgtggaccaggaactggacatcaaccggctgtccgactacgatgtggaccatatcgtgcctcagagctttctgaaggacgactccatcgacaacaaggtgctgaccagaagcgacaagaaccggggcaagagcgacaacgtgccctccgaagaggtcgtgaagaagatgaagaactactggcggcagctgctgaacgccaagctgattacccagagaaagttcgacaatctgaccaaggccgagagaggcggcctgagcgaactggataaggccggcttcatcaagagacagctggtggaaacccggcagatcacaaagcacgtggcacagatcctggactcccggatgaacactaagtacgacgagaatgacaagctgatccgggaagtgaaagtgatcaccctgaagtccaagctggtgtccgatttccggaaggatttccagttttacaaagtgcgcgagatcaacaactaccaccacgcccacgacgcctacctgaacgccgtcgtgggaaccgccctgatcaaaaagtaccctaagctggaaagcgagttcgtgtacggcgactacaaggtgtacgacgtgcggaagatgatcgccaagagcgagcaggaaatcggcaaggctaccgccaagtacttcttctacagcaacatcatgaactttttcaagaccgagattaccctggccaacggcgagatccggaagcggcctctgatcgagacaaacggcgaaaccggggagatcgtgtgggataagggccgggattttgccaccgtgcggaaagtgctgagcatgccccaagtgaatatcgtgaaaaagaccgaggtgcagacaggcggcttcagcaaagagtctatcctgcccaagaggaacagcgataagctgatcgccagaaagaaggactgggaccctaagaagtacggcggcttcgacagccccaccgtggcctattctgtgctggtggtggccaaagtggaaaagggcaagtccaagaaactgaagagtgtgaaagagctgctggggatcaccatcatggaaagaagcagcttcgagaagaatcccatcgactttctggaagccaagggctacaaagaagtgaaaaaggacctgatcatcaagctgcctaagtactccctgttcgagctggaaaacggccggaagagaatgctggcctctgccggcgaactgcagaagggaaacgaactggccctgccctccaaatatgtgaacttcctgtacctggccagccactatgagaagctgaagggctcccccgaggataatgagcagaaacagctgtttgtggaacagcacaagcactacctggacgagatcatcgagcagatcagcgagttctccaagagagtgatcctggccgacgctaatctggacaaagtgctgtccgcctacaacaagcaccgggataagcccatcagagagcaggccgagaatatcatccacctgtttaccctgaccaatctgggagcccctgccgccttcaagtactttgacaccaccatcgaccggaagaggtacaccagcaccaaagaggtgctggacgccaccctgatccaccagagcatcaccggcctgtacgagacacggatcgacctgtctcagctgggaggcgacaaaaggccggcggccacgaaaaaggccggccaggcaaaaaagaaaaagtaagaattcctagagctcgctgatcagcctcgactgtgccttctagttgccagccatctgttgtttgcccctcccccgtgccttccttgaccctggaaggtgccactcccactgtcctttcctaataaaatgaggaaattgcatcgcattgtctgagtaggtgtcattctattctggggggtggggtggggcaggacagcaagggggaggattgggaagagaatagcaggcatgctggggagcggccgcaggaacccctagtgatggagttggccactccctctctgcgcgctcgctcgctcactgaggccgggcgaccaaaggtcgcccgacgcccgggctttgcccgggcggcctcagtgagcgagcgagcgcgcagctgcctgcaggggcgcctgatgcggtattttctccttacgcatctgtgcggtatttcacaccgcatacgtcaaagcaaccatagtacgcgccctgtagcggcgcattaagcgcggcgggtgtggtggttacgcgcagcgtgaccgctacacttgccagcgccctagcgcccgctcctttcgctttcttcccttcctttctcgccacgttcgccggctttccccgtcaagctctaaatcgggggctccctttagggttccgatttagtgctttacggcacctcgaccccaaaaaacttgatttgggtgatggttcacgtagtgggccatcgccctgatagacggtttttcgccctttgacgttggagtccacgttctttaatagtggactcttgttccaaactggaacaacactcaaccctatctcgggctattcttttgatttataagggattttgccgatttcggcctattggttaaaaaatgagctgatttaacaaaaatttaacgcgaattttaacaaaatattaacgtttacaattttatggtgcactctcagtacaatctgctctgatgccgcatagttaagccagccccgacacccgccaacacccgctgacgcgccctgacgggcttgtctgctcccggcatccgcttacagacaagctgtgaccgtctccgggagctgcatgtgtcagaggttttcaccgtcatcaccgaaacgcgcgagacgaaagggcctcgtgatacgcctatttttataggttaatgtcatgataataatggtttcttagacgtcaggtggcacttttcggggaaatgtgcgcggaacccctatttgtttatttttctaaatacattcaaatatgtatccgctcatgagacaataaccctgataaatgcttcaataatattgaaaaaggaagagtatgagtattcaacatttccgtgtcgcccttattcccttttttgcggcattttgccttcctgtttttgctcacccagaaacgctggtgaaagtaaaagatgctgaagatcagttgggtgcacgagtgggttacatcgaactggatctcaacagcggtaagatccttgagagttttcgccccgaagaacgttttccaatgatgagcacttttaaagttctgctatgtggcgcggtattatcccgtattgacgccgggcaagagcaactcggtcgccgcatacactattctcagaatgacttggttgagtactcaccagtcacagaaaagcatcttacggatggcatgacagtaagagaattatgcagtgctgccataaccatgagtgataacactgcggccaacttacttctgacaacgatcggaggaccgaaggagctaaccgcttttttgcacaacatgggggatcatgtaactcgccttgatcgttgggaaccggagctgaatgaagccataccaaacgacgagcgtgacaccacgatgcctgtagcaatggcaacaacgttgcgcaaactattaactggcgaactacttactctagcttcccggcaacaattaatagactggatggaggcggataaagttgcaggaccacttctgcgctcggcccttccggctggctggtttattgctgataaatctggagccggtgagcgtggaagccgcggtatcattgcagcactggggccagatggtaagccctcccgtatcgtagttatctacacgacggggagtcaggcaactatggatgaacgaaatagacagatcgctgagataggtgcctcactgattaagcattggtaactgtcagaccaagtttactcatatatactttagattgatttaaaacttcatttttaatttaaaaggatctaggtgaagatcctttttgataatctcatgaccaaaatcccttaacgtgagttttcgttccactgagcgtcagaccccgtagaaaagatcaaaggatcttcttgagatcctttttttctgcgcgtaatctgctgcttgcaaacaaaaaaaccaccgctaccagcggtggtttgtttgccggatcaagagctaccaactctttttccgaaggtaactggcttcagcagagcgcagataccaaatactgtccttctagtgtagccgtagttaggccaccacttcaagaactctgtagcaccgcctacatacctcgctctgctaatcctgttaccagtggctgctgccagtggcgataagtcgtgtcttaccgggttggactcaagacgatagttaccggataaggcgcagcggtcgggctgaacggggggttcgtgcacacagcccagcttggagcgaacgacctacaccgaactgagatacctacagcgtgagctatgagaaagcgccacgcttcccgaagggagaaaggcggacaggtatccggtaagcggcagggtcggaacaggagagcgcacgagggagcttccagggggaaacgcctggtatctttatagtcctgtcgggtttcgccacctctgacttgagcgtcgatttttgtgatgctcgtcaggggggcggagcctatggaaaaacgccagcaacgcggcctttttacggttcctggccttttgctggccttttgctcacatgt

SEQ ID NO: 68 - DNA, 4032 bp, artificial sequence
  pZFN-AAVS1-L-ELD
gactcttcgcgatgtacgggccagatatacgcgttgacattgattattgactagttattaatagtaatcaattacggggtcattagttcatagcccatatatggagttccgcgttacataacttacggtaaatggcccgcctggctgaccgcccaacgacccccgcccattgacgtcaataatgacgtatgttcccatagtaacgccaatagggactttccattgacgtcaatgggtggactatttacggtaaactgcccacttggcagtacatcaagtgtatcatatgccaagtacgccccctattgacgtcaatgacggtaaatggcccgcctggcattatgcccagtacatgaccttatgggactttcctacttggcagtacatctacgtattagtcatcgctattaccatggtgatgcggttttggcagtacatcaatgggcgtggatagcggtttgactcacggggatttccaagtctccaccccattgacgtcaatgggagtttgttttggcaccaaaatcaacgggactttccaaaatgtcgtaacaactccgccccattgacgcaaatgggcggtaggcgtgtacggtgggaggtctatataagcagagctctctggctaactagagaacccactgcttactggcttatcgaaattaatacgactcactatagggagacccaagctggctagcgtttaaacttaagctgatccactagtccagtgtggtggaattcgccatggactacaaagaccatgacggtgattataaagatcatgacatcgattacaaggatgacgatgacaagatggcccccaagaagaagaggaaggtgggcattcacggggtacccgccgctatggccgagcggcccttccagtgccggatctgcatgcggaacttcagctacaactggcatctgcagcggcacatccggacccacaccggcgagaagcccttcgcctgcgacatctgcggccggaagttcgccagaagcgaccacctgaccacccacaccaagatccacacaggcagccagaaaccttttcagtgcagaatctgtatgagaaacttctcccacaactacgcccgggactgccacatcagaacacacacaggggagaaaccttttgcctgcgatatctgtgggcgcaaatttgcccagaacagcacccggatcgggcacacaaagattcacctgagaggatcccagctggtgaagagcgagctggaggagaagaagtccgagctgcggcacaagctgaagtacgtgccccacgagtacatcgagctgatcgagatcgccaggaacagcacccaggaccgcatcctggagatgaaggtgatggagttcttcatgaaggtgtacggctacaggggaaagcacctgggcggaagcagaaagcctgacggcgccatctatacagtgggcagccccatcgattacggcgtgatcgtggacacaaaggcctacagcggcggctacaatctgcctatcggccaggccgacgagatggagagatacgtggaggagaaccagacccgggataagcacctcaaccccaacgagtggtggaaggtgtaccctagcagcgtgaccgagttcaagttcctgttcgtgagcggccacttcaagggcaactacaaggcccagctgaccaggctgaaccacatcaccaactgcaatggcgccgtgctgagcgtggaggagctgctgatcggcggcgagatgatcaaagccggcaccctgacactggaggaggtgcggcgcaagttcaacaacggcgagatcaacttcagatcttgataactcgagtctagagggcccgtttaaacccgctgatcagcctcgactgtgccttctagttgccagccatctgttgtttgcccctcccccgtgccttccttgaccctggaaggtgccactcccactgtcctttcctaataaaatgaggaaattgcatcgcattgtctgagtaggtgtcattctattctggggggtggggtggggcaggacagcaagggggaggattgggaagacaatagcaggcatgctggggatgcggtgggctctatggcttctactgggcggttttatggacagcaagcgaaccggaattgccagctggggcgccctctggtaaggttgggaagccctgcaaagtaaactggatggctttctcgccgccaaggatctgatggcgcaggggatcaagctctgatcaagagacaggatgaggatcgtttcgcatgattgaacaagatggattgcacgcaggttctccggccgcttgggtggagaggctattcggctatgactgggcacaacagacaatcggctgctctgatgccgccgtgttccggctgtcagcgcaggggcgcccggttctttttgtcaagaccgacctgtccggtgccctgaatgaactgcaagacgaggcagcgcggctatcgtggctggccacgacgggcgttccttgcgcagctgtgctcgacgttgtcactgaagcgggaagggactggctgctattgggcgaagtgccggggcaggatctcctgtcatctcaccttgctcctgccgagaaagtatccatcatggctgatgcaatgcggcggctgcatacgcttgatccggctacctgcccattcgaccaccaagcgaaacatcgcatcgagcgagcacgtactcggatggaagccggtcttgtcgatcaggatgatctggacgaagagcatcaggggctcgcgccagccgaactgttcgccaggctcaaggcgagcatgcccgacggcgaggatctcgtcgtgacccatggcgatgcctgcttgccgaatatcatggtggaaaatggccgcttttctggattcatcgactgtggccggctgggtgtggcggaccgctatcaggacatagcgttggctacccgtgatattgctgaagagcttggcggcgaatgggctgaccgcttcctcgtgctttacggtatcgccgctcccgattcgcagcgcatcgccttctatcgccttcttgacgagttcttctgaattattaacgcttacaatttcctgatgcggtattttctccttacgcatctgtgcggtatttcacaccgcatacaggtggcacttttcggggaaatgtgcgcggaacccctatttgtttatttttctaaatacattcaaatatgtatccgctcatgagacaataaccctgataaatgcttcaataatagcacgtgctaaaacttcatttttaatttaaaaggatctaggtgaagatcctttttgataatctcatgaccaaaatcccttaacgtgagttttcgttccactgagcgtcagaccccgtagaaaagatcaaaggatcttcttgagatcctttttttctgcgcgtaatctgctgcttgcaaacaaaaaaaccaccgctaccagcggtggtttgtttgccggatcaagagctaccaactctttttccgaaggtaactggcttcagcagagcgcagataccaaatactgtccttctagtgtagccgtagttaggccaccacttcaagaactctgtagcaccgcctacatacctcgctctgctaatcctgttaccagtggctgctgccagtggcgataagtcgtgtcttaccgggttggactcaagacgatagttaccggataaggcgcagcggtcgggctgaacggggggttcgtgcacacagcccagcttggagcgaacgacctacaccgaactgagatacctacagcgtgagctatgagaaagcgccacgcttcccgaagggagaaaggcggacaggtatccggtaagcggcagggtcggaacaggagagcgcacgagggagcttccagggggaaacgcctggtatctttatagtcctgtcgggtttcgccacctctgacttgagcgtcgatttttgtgatgctcgtcaggggggcggagcctatggaaaaacgccagcaacgcggcctttttacggttcctgggcttttgctggccttttgctcacatgttctt

SEQ ID NO: 69 - DNA, 4032 bp, artificial sequence
  pZFN-AAVS1-R_KKR
gactcttcgcgatgtacgggccagatatacgcgttgacattgattattgactagttattaatagtaatcaattacggggtcattagttcatagcccatatatggagttccgcgttacataacttacggtaaatggcccgcctggctgaccgcccaacgacccccgcccattgacgtcaataatgacgtatgttcccatagtaacgccaatagggactttccattgacgtcaatgggtggactatttacggtaaactgcccacttggcagtacatcaagtgtatcatatgccaagtacgccccctattgacgtcaatgacggtaaatggcccgcctggcattatgcccagtacatgaccttatgggactttcctacttggcagtacatctacgtattagtcatcgctattaccatggtgatgcggttttggcagtacatcaatgggcgtggatagcggtttgactcacggggatttccaagtctccaccccattgacgtcaatgggagtttgttttggcaccaaaatcaacgggactttccaaaatgtcgtaacaactccgccccattgacgcaaatgggcggtaggcgtgtacggtgggaggtctatataagcagagctctctggctaactagagaacccactgcttactggcttatcgaaattaatacgactcactatagggagacccaagctggctagcgtttaaacttaagctgatccactagtccagtgtggtggaattcgccatggactacaaagaccatgacggtgattataaagatcatgacatcgattacaaggatgacgatgacaagatggcccccaagaagaagaggaaggtgggcattcacggggtacccgccgctatggccgagcggcccttccagtgccggatctgcatgcggaactttagccagagcagcaacctggcccggcacatcagaacccacacaggcgagaagcccttcgcctgcgacatctgcggccggaagttcgcccggaccgactacctggtggaccacaccaagatccacaccggcagccagaaaccttttcagtgcagaatctgtatgagaaacttcagctacaacacccacctgaccagacacatccggacacacactggggagaaaccttttgcctgcgatatctgtgggagaaagtttgcccagggctacaatctggccgggcacacaaagattcacctgagaggatcccagctggtgaagagcgagctggaggagaagaagtccgagctgcggcacaagctgaagtacgtgccccacgagtacatcgagctgatcgagatcgccaggaacagcacccaggaccgcatcctggagatgaaggtgatggagttcttcatgaaggtgtacggctacaggggaaagcacctgggcggaagcagaaagcctgacggcgccatctatacagtgggcagccccatcgattacggcgtgatcgtggacacaaaggcctacagcggcggctacaatctgcctatcggccaggccgacgagatgcagagatacgtgaaggagaaccagacccggaataagcacatcaaccccaacgagtggtggaaggtgtaccctagcagcgtgaccgagttcaagttcctgttcgtgagcggccacttcaagggcaactacaaggcccagctgaccaggctgaaccgcaaaaccaactgcaatggcgccgtgctgagcgtggaggagctgctgatcggcggcgagatgatcaaagccggcaccctgacactggaggaggtgcggcgcaagttcaacaacggcgagatcaacttcagatcttgataactcgagtctagagggcccgtttaaacccgctgatcagcctcgactgtgccttctagttgccagccatctgttgtttgcccctcccccgtgccttccttgaccctggaaggtgccactcccactgtcctttcctaataaaatgaggaaattgcatcgcattgtctgagtaggtgtcattctattctggggggtggggtggggcaggacagcaagggggaggattgggaagacaatagcaggcatgctggggatgcggtgggctctatggcttctactgggcggttttatggacagcaagcgaaccggaattgccagctggggcgccctctggtaaggttgggaagccctgcaaagtaaactggatggctttctcgccgccaaggatctgatggcgcaggggatcaagctctgatcaagagacaggatgaggatcgtttcgcatgattgaacaagatggattgcacgcaggttctccggccgcttgggtggagaggctattcggctatgactgggcacaacagacaatcggctgctctgatgccgccgtgttccggctgtcagcgcaggggcgcccggttctttttgtcaagaccgacctgtccggtgccctgaatgaactgcaagacgaggcagcgcggctatcgtggctggccacgacgggcgttccttgcgcagctgtgctcgacgttgtcactgaagcgggaagggactggctgctattgggcgaagtgccggggcaggatctcctgtcatctcaccttgctcctgccgagaaagtatccatcatggctgatgcaatgcggcggctgcatacgcttgatccggctacctgcccattcgaccaccaagcgaaacatcgcatcgagcgagcacgtactcggatggaagccggtcttgtcgatcaggatgatctggacgaagagcatcaggggctcgcgccagccgaactgttcgccaggctcaaggcgagcatgcccgacggcgaggatctcgtcgtgacccatggcgatgcctgcttgccgaatatcatggtggaaaatggccgcttttctggattcatcgactgtggccggctgggtgtggcggaccgctatcaggacatagcgttggctacccgtgatattgctgaagagcttggcggcgaatgggctgaccgcttcctcgtgctttacggtatcgccgctcccgattcgcagcgcatcgccttctatcgccttcttgacgagttcttctgaattattaacgcttacaatttcctgatgcggtattttctccttacgcatctgtgcggtatttcacaccgcatacaggtggcacttttcggggaaatgtgcgcggaacccctatttgtttatttttctaaatacattcaaatatgtatccgctcatgagacaataaccctgataaatgcttcaataatagcacgtgctaaaacttcatttttaatttaaaaggatctaggtgaagatcctttttgataatctcatgaccaaaatcccttaacgtgagttttcgttccactgagcgtcagaccccgtagaaaagatcaaaggatcttcttgagatcctttttttctgcgcgtaatctgctgcttgcaaacaaaaaaaccaccgctaccagcggtggtttgtttgccggatcaagagctaccaactctttttccgaaggtaactggcttcagcagagcgcagataccaaatactgtccttctagtgtagccgtagttaggccaccacttcaagaactctgtagcaccgcctacatacctcgctctgctaatcctgttaccagtggctgctgccagtggcgataagtcgtgtcttaccgggttggactcaagacgatagttaccggataaggcgcagcggtcgggctgaacggggggttcgtgcacacagcccagcttggagcgaacgacctacaccgaactgagatacctacagcgtgagctatgagaaagcgccacgcttcccgaagggagaaaggcggacaggtatccggtaagcggcagggtcggaacaggagagcgcacgagggagcttccagggggaaacgcctggtatctttatagtcctgtcgggtttcgccacctctgacttgagcgtcgatttttgtgatgctcgtcaggggggcggagcctatggaaaaacgccagcaacgcggcctttttacggttcctgggcttttgctggccttttgctcacatgttctt

SEQ ID NO: 70 - DNA, 1068 bp, artificial sequence
  AAVS1-L_ZFN
atggactacaaagaccatgacggtgattataaagatcatgacatcgattacaaggatgacgatgacaagatggcccccaagaagaagaggaaggtgggcattcacggggtacccgccgctatggccgagcggcccttccagtgccggatctgcatgcggaacttcagctacaactggcatctgcagcggcacatccggacccacaccggcgagaagcccttcgcctgcgacatctgcggccggaagttcgccagaagcgaccacctgaccacccacaccaagatccacacaggcagccagaaaccttttcagtgcagaatctgtatgagaaacttctcccacaactacgcccgggactgccacatcagaacacacacaggggagaaaccttttgcctgcgatatctgtgggcgcaaatttgcccagaacagcacccggatcgggcacacaaagattcacctgagaggatcccagctggtgaagagcgagctggaggagaagaagtccgagctgcggcacaagctgaagtacgtgccccacgagtacatcgagctgatcgagatcgccaggaacagcacccaggaccgcatcctggagatgaaggtgatggagttcttcatgaaggtgtacggctacaggggaaagcacctgggcggaagcagaaagcctgacggcgccatctatacagtgggcagccccatcgattacggcgtgatcgtggacacaaaggcctacagcggcggctacaatctgcctatcggccaggccgacgagatggagagatacgtggaggagaaccagacccgggataagcacctcaaccccaacgagtggtggaaggtgtaccctagcagcgtgaccgagttcaagttcctgttcgtgagcggccacttcaagggcaactacaaggcccagctgaccaggctgaaccacatcaccaactgcaatggcgccgtgctgagcgtggaggagctgctgatcggcggcgagatgatcaaagccggcaccctgacactggaggaggtgcggcgcaagttcaacaacggcgagatcaacttcagatcttga

SEQ ID NO: 71 - DNA, 1068 bp, artificial sequence
  AAVS1-R-ZFN
atggactacaaagaccatgacggtgattataaagatcatgacatcgattacaaggatgacgatgacaagatggcccccaagaagaagaggaaggtgggcattcacggggtacccgccgctatggccgagcggcccttccagtgccggatctgcatgcggaactttagccagagcagcaacctggcccggcacatcagaacccacacaggcgagaagcccttcgcctgcgacatctgcggccggaagttcgcccggaccgactacctggtggaccacaccaagatccacaccggcagccagaaaccttttcagtgcagaatctgtatgagaaacttcagctacaacacccacctgaccagacacatccggacacacactggggagaaaccttttgcctgcgatatctgtgggagaaagtttgcccagggctacaatctggccgggcacacaaagattcacctgagaggatcccagctggtgaagagcgagctggaggagaagaagtccgagctgcggcacaagctgaagtacgtgccccacgagtacatcgagctgatcgagatcgccaggaacagcacccaggaccgcatcctggagatgaaggtgatggagttcttcatgaaggtgtacggctacaggggaaagcacctgggcggaagcagaaagcctgacggcgccatctatacagtgggcagccccatcgattacggcgtgatcgtggacacaaaggcctacagcggcggctacaatctgcctatcggccaggccgacgagatgcagagatacgtgaaggagaaccagacccggaataagcacatcaaccccaacgagtggtggaaggtgtaccctagcagcgtgaccgagttcaagttcctgttcgtgagcggccacttcaagggcaactacaaggcccagctgaccaggctgaaccgcaaaaccaactgcaatggcgccgtgctgagcgtggaggagctgctgatcggcggcgagatgatcaaagccggcaccctgacactggaggaggtgcggcgcaagttcaacaacggcgagatcaacttcagatcttga

SEQ ID NO: 72 - DNA, 8351 bp, artificial sequence
  pUC_ROSA_n_CAG-rtTA
tcgcgcgtttcggtgatgacggtgaaaacctctgacacatgcagctcccggagacggtcacagcttgtctgtaagcggatgccgggagcagacaagcccgtcagggcgcgtcagcgggtgttggcgggtgtcggggctggcttaactatgcggcatcagagcagattgtactgagagtgcaccatatgcggtgtgaaataccgcacagatgcgtaaggagaaaataccgcatcaggcgccattcgccattcaggctgcgcaactgttgggaagggcgatcggtgcgggcctcttcgctattacgccagctggcgaaagggggatgtgctgcaaggcgattaagttgggtaacgccagggttttcccagtcacgacgttgtaaaacgacggccagtgaattggctcgaaaccggacggagccattgctctcgcagagggaggagcgcttccggctagcctcttgtcgccgattggccgtttctcctcccgccgtgtgtgaaaacacaaatggcgtattctggttggagtaaagctcctgtcagttacgccgtcgggagtacgcagccgcttagcgactctcgcgttgccccctgggtggggcgggtaggtaggtggggtgtagagatgctgggtgtgcgggcgcggccggcctcctgcggcgggaggggagggtcagtgaaatcggctctggcgcgggcgtcctcccaccctccccttccttcgggggagtcggtttacccgccgcctgcttgtcttcgacacctgattggctgtcgaagctgtgggaccgggcccttgctactggctcgagtctcacatgagcgaaaccactgcgcggggcgcgggggtggcggggaggcgggcgttggtacggtcctccccgaggccgagcgccgcagtgtctggccccgcgcccctgcgcaacgtggcaggaagcgcgcgctggaggcgggggcgggctgccggccgagacttctggatggcggcggccgcggctccgccccgggttcccaccgcctgaagggcgagacaagcccgacctgctacaggcactcgtgggggtgggggaggagcgggggtcggtccggctggtttgtgggtgggaggcgcttgttctccaaaaaccggcgcgagctgcaatcctgagggagctgcggtggaggaggtggagagaaggccgcacccttctgggcagggggaggggagtgccgcaatacctttatgggagttctctgctgcctcccgtcttgtaaggaccgccctgggcctggaagaagccctccctcctttcctcctcgcgtgatcggtacctagggcgcagtagtccagggtttccttgatgatgtcatacttatcctgtcccttttttttccacagctcgcggttgaggacaaactcttcgcggtctttccagtttcgaacgggagatctgccaccatgggatcggccattgaacaagatggattgcacgcaggttctccggccgcttgggtggagaggctattcggctatgactgggcacaacagacaatcggctgctctgatgccgccgtgttccggctgtcagcgcaggggcgcccggttctttttgtcaagaccgacctgtccggtgccctgaatgaactgcaggacgaggcagcgcggctatcgtggctggccacgacgggcgttccttgcgcagctgtgctcgacgttgtcactgaagcgggaagggactggctgctattgggcgaagtgccggggcaggatctcctgtcatctcaccttgctcctgccgagaaagtatccatcatggctgatgcaatgcggcggctgcatacgcttgatccggctacctgcccattcgaccaccaagcgaaacatcgcatcgagcgagcacgtactcggatggaagccggtcttgtcgatcaggatgatctggacgaagagcatcaggggctcgcgccagccgaactgttcgccaggctcaaggcgcgcatgcccgacggcgatgatctcgtcgtgacccatggcgatgcctgcttgccgaatatcatggtggaaaatggccgcttttctggattcatcgactgtggccggctgggtgtggcggaccgctatcaggacatagcgttggctacccgtgatattgctgaagagcttggcggcgaatgggctgaccgcttcctcgtgctttacggtatcgccgctcccgattcgcagcgcatcgccttctatcgccttcttgacgagttcttctgaggggatcaattctctagcgctgatcagcctcgactgtgccttctagttgccagccatctgttgtttgcccctcccccgtgccttccttgaccctggaaggtgccactcccactgtcctttcctaataaaatgaggaaattgcatcgcattgtctgagtaggtgtcattctattctggggggtggggtggggcaggacagcaagggggaggattgggaagacaatagcaggcatgctggggatgcggtgggctctatggcttctgaggcggaaagaaccagctggactagttattaatagtaatcaattacggggtcattagttcatagcccatatatggagttccgcgttacataacttacggtaaatggcccgcctggctgaccgcccaacgacccccgcccattgacgtcaataatgacgtatgttcccatagtaacgccaatagggactttccattgacgtcaatgggtggagtatttacggtaaactgcccacttggcagtacatcaagtgtatcatatgccaagtacgccccctattgacgtcaatgacggtaaatggcccgcctggcattatgcccagtacatgaccttatgggactttcctacttggcagtacatctacgtattagtcatcgctattaccatggtcgaggtgagccccacgttctgcttcactctccccatctcccccccctccccacccccaattttgtatttatttattttttaattattttgtgcagcgatgggggcggggggggggggggggcgcgcgccaggcggggcggggcggggcgaggggcggggcggggcgaggcggagaggtgcggcggcagccaatcagagcggcgcgctccgaaagtttccttttatggcgaggcggcggcggcggcggccctataaaaagcgaagcgcgcggcgggcggggagtcgctgcgacgctgccttcgccccgtgccccgctccgccgccgcctcgcgccgcccgccccggctctgactgaccgcgttactcccacaggtgagcgggcgggacggcccttctcctccgggctgtaattagcgcttggtttaatgacggcttgtttcttttctgtggctgcgtgaaagccttgaggggctccgggagggccctttgtgcggggggagcggctcggggggtgcgtgcgtgtgtgtgtgcgtggggagcgccgcgtgcggctccgcgctgcccggcggctgtgagcgctgcgggcgcggcgcggggctttgtgcgctccgcagtgtgcgcgaggggagcgcggccgggggcggtgccccgcggtgcggggggggctgcgaggggaacaaaggctgcgtgcggggtgtgtgcgtgggggggtgagcagggggtgtgggcgcgtcggtcgggctgcaaccccccctgcacccccctccccgagttgctgagcacggcccggcttcgggtgcggggctccgtacggggcgtggcgcggggctcgccgtgccgggcggggggtggcggcaggtgggggtgccgggcggggcggggccgcctcgggccggggagggctcgggggaggggcgcggcggcccccggagcgccggcggctgtcgaggcgcggcgagccgcagccattgccttttatggtaatcgtgcgagagggcgcagggacttcctttgtcccaaatctgtgcggagccgaaatctgggaggcgccgccgcaccccctctagcgggcgcggggcgaagcggtgcggcgccggcaggaaggaaatgggcggggagggccttcgtgcgtcgccgcgccgccgtccccttctccctctccagcctcggggctgtccgcggggggacggctgccttcgggggggacggggcagggcggggttcggcttctggcgtgtgaccggcggctctagagcctctgctaaccatgttcatgccttcttctttttcctacagctcctgggcaacgtgctggttattgtgctgtctcatcattttggcaaagaattaattcggatccaccatgtctagactggacaagagcaaagtcataaactctgctctggaattactcaatggagtcggtatcgaaggcctgacgacaaggaaactcgctcaaaagctgggagttgagcagcctaccctgtactggcacgtgaagaacaagcgggccctgctcgatgccctgccaatcgagatgctggacaggcatcatacccactcctgccccctggaaggcgagtcatggcaagactttctgcggaacaacgccaagtcataccgctgtgctctcctctcacatcgcgacggggctaaagtgcatctcggcacccgcccaacagagaaacagtacgaaaccctggaaaatcagctcgcgttcctgtgtcagcaaggcttctccctggagaacgcactgtacgctctgtccgccgtgggccactttacactgggctgcgtattggaggaacaggagcatcaagtagcaaaagaggaaagagagacacctaccaccgattctatgcccccacttctgaaacaagcaattgagctgttcgaccggcagggagccgaacctgccttccttttcggcctggaactaatcatatgtggcctggagaaacagctaaagtgcgaaagcggcgggccgaccgacgcccttgacgattttgacttagacatgctcccagccgatgcccttgacgactttgaccttgatatgctgcctgctgacgctcttgacgattttgaccttgacatgctccccgggtaaacgcgtagctcgctgatcagcctcgactgtgccttctagttgccagccatctgttgtttgcccctcccccgtgccttccttgaccctggaaggtgccactcccactgtcctttcctaataaaatgaggaaattgcatcgcattgtctgagtaggtgtcattctattctggggggtggggtggggcaggacagcaagggggaggattgggaagagaatagcaggcatgctgggggtcgacgcttctcgattatgggcgggattcttttgcctaggcttaaggggctaacttggtccctgggcgttgccctgcaggggagtgagcagctgtaagatttgaggggcgactccgattagtttatcttcccacggactagagttggtgtcgaggttattgtaataagggtggggtagggaaatggagcttagtcattcacctggggctgattttatgcaacgagactgcggattatcactacttatcatttttggagcatttttctagagacagacataaagcatgatcacctgagttttataccatttgagacccttgctgcaccaccaaagtgtagcatcaggttaaatcttaatagaaaaattttagcttttgcttgagaaaccagtgcttccctccctcaccctctctccccaggctctctacccctttgcatccctaccaggcatcttagcaactctcactcatacttgatcccattttccatttgttgtacttgctcctctagtattcagacatagcactagctttctccctctcttgatcttgggtagcctggtgtctcgcgaaaccagacagattggttccaccacaaattaaggcttgagctggggcttgactcttacccagcagtgcttttattcctccctagttcacgttcttaaatgtttatcttgattttcattttatcctttttccttagctgggattctgtccctgaccgtcttcacagtccaggtgatcttgactactgctttacagagaattggatctgaggttaggcaacatctccctttttcttcctctaaatacctctcatttctgttcttaccagttagtaactgatctcagatgcctgtgtgatagcttccaagcttggcgtaatcatggtcatagctgtttcctgtgtgaaattgttatccgctcacaattccacacaacatacgagccggaagcataaagtgtaaagcctggggtgcctaatgagtgagctaactcacattaattgcgttgcgctcactgcccgctttccagtcgggaaacctgtcgtgccagctgcattaatgaatcggccaacgcgcggggagaggcggtttgcgtattgggcgctcttccgcttcctcgctcactgactcgctgcgctcggtcgttcggctgcggcgagcggtatcagctcactcaaaggcggtaatacggttatccacagaatcaggggataacgcaggaaagaacatgtgagcaaaaggccagcaaaaggccaggaaccgtaaaaaggccgcgttgctggcgtttttccataggctccgcccccctgacgagcatcacaaaaatcgacgctcaagtcagaggtggcgaaacccgacaggactataaagataccaggcgtttccccctggaagctccctcgtgcgctctcctgttccgaccctgccgcttaccggatacctgtccgcctttctcccttcgggaagcgtggcgctttctcatagctcacgctgtaggtatctcagttcggtgtaggtcgttcgctccaagctgggctgtgtgcacgaaccccccgttcagcccgaccgctgcgccttatccggtaactatcgtcttgagtccaacccggtaagacacgacttatcgccactggcagcagccactggtaacaggattagcagagcgaggtatgtaggcggtgctacagagttcttgaagtggtggcctaactacggctacactagaagaacagtatttggtatctgcgctctgctgaagccagttaccttcggaaaaagagttggtagctcttgatccggcaaacaaaccaccgctggtagcggtggtttttttgtttgcaagcagcagattacgcgcagaaaaaaaggatctcaagaagatcctttgatcttttctacggggtctgacgctcagtggaacgaaaactcacgttaagggattttggtcatgagattatcaaaaaggatcttcacctagatccttttaaattaaaaatgaagttttaaatcaatctaaagtatatatgagtaaacttggtctgacagttaccaatgcttaatcagtgaggcacctatctcagcgatctgtctatttcgttcatccatagttgcctgactccccgtcgtgtagataactacgatacgggagggcttaccatctggccccagtgctgcaatgataccgcgagacccacgctcaccggctccagatttatcagcaataaaccagccagccggaagggccgagcgcagaagtggtcctgcaactttatccgcctccatccagtctattaattgttgccgggaagctagagtaagtagttcgccagttaatagtttgcgcaacgttgttgccattgctacaggcatcgtggtgtcacgctcgtcgtttggtatggcttcattcagctccggttcccaacgatcaaggcgagttacatgatcccccatgttgtgcaaaaaagcggttagctccttcggtcctccgatcgttgtcagaagtaagttggccgcagtgttatcactcatggttatggcagcactgcataattctcttactgtcatgccatccgtaagatgcttttctgtgactggtgagtactcaaccaagtcattctgagaatagtgtatgcggcgaccgagttgctcttgcccggcgtcaatacgggataataccgcgccacatagcagaactttaaaagtgctcatcattggaaaacgttcttcggggcgaaaactctcaaggatcttaccgctgttgagatccagttcgatgtaacccactcgtgcacccaactgatcttcagcatcttttactttcaccagcgtttctgggtgagcaaaaacaggaaggcaaaatgccgcaaaaaagggaataagggcgacacggaaatgttgaatactcatactcttcctttttcaatattattgaagcatttatcagggttattgtctcatgagcggatacatatttgaatgtatttagaaaaataaacaaataggggttccgcgcacatttccccgaaaagtgccacctgacgtctaagaaaccattattatcatgacattaacctataaaaataggcgtatcacgaggccctttcgtc

SEQ ID NO: 73 - DNA, 2477 bp, artificial sequence
  vector CAG-rtTA
ctagttattaatagtaatcaattacggggtcattagttcatagcccatatatggagttccgcgttacataacttacggtaaatggcccgcctggctgaccgcccaacgacccccgcccattgacgtcaataatgacgtatgttcccatagtaacgccaatagggactttccattgacgtcaatgggtggagtatttacggtaaactgcccacttggcagtacatcaagtgtatcatatgccaagtacgccccctattgacgtcaatgacggtaaatggcccgcctggcattatgcccagtacatgaccttatgggactttcctacttggcagtacatctacgtattagtcatcgctattaccatggtcgaggtgagccccacgttctgcttcactctccccatctcccccccctccccacccccaattttgtatttatttattttttaattattttgtgcagcgatgggggcggggggggggggggggcgcgcgccaggcggggcggggcggggcgaggggcggggcggggcgaggcggagaggtgcggcggcagccaatcagagcggcgcgctccgaaagtttccttttatggcgaggcggcggcggcggcggccctataaaaagcgaagcgcgcggcgggcggggagtcgctgcgacgctgccttcgccccgtgccccgctccgccgccgcctcgcgccgcccgccccggctctgactgaccgcgttactcccacaggtgagcgggcgggacggcccttctcctccgggctgtaattagcgcttggtttaatgacggcttgtttcttttctgtggctgcgtgaaagccttgaggggctccgggagggccctttgtgcggggggagcggctcggggggtgcgtgcgtgtgtgtgtgcgtggggagcgccgcgtgcggctccgcgctgcccggcggctgtgagcgctgcgggcgcggcgcggggctttgtgcgctccgcagtgtgcgcgaggggagcgcggccgggggcggtgccccgcggtgcggggggggctgcgaggggaacaaaggctgcgtgcggggtgtgtgcgtgggggggtgagcagggggtgtgggcgcgtcggtcgggctgcaaccccccctgcacccccctccccgagttgctgagcacggcccggcttcgggtgcggggctccgtacggggcgtggcgcggggctcgccgtgccgggcggggggtggcggcaggtgggggtgccgggcggggcggggccgcctcgggccggggagggctcgggggaggggcgcggcggcccccggagcgccggcggctgtcgaggcgcggcgagccgcagccattgccttttatggtaatcgtgcgagagggcgcagggacttcctttgtcccaaatctgtgcggagccgaaatctgggaggcgccgccgcaccccctctagcgggcgcggggcgaagcggtgcggcgccggcaggaaggaaatgggcggggagggccttcgtgcgtcgccgcgccgccgtccccttctccctctccagcctcggggctgtccgcggggggacggctgccttcgggggggacggggcagggcggggttcggcttctggcgtgtgaccggcggctctagagcctctgctaaccatgttcatgccttcttctttttcctacagctcctgggcaacgtgctggttattgtgctgtctcatcattttggcaaagaattaattcggatccaccatgtctagactggacaagagcaaagtcataaactctgctctggaattactcaatggagtcggtatcgaaggcctgacgacaaggaaactcgctcaaaagctgggagttgagcagcctaccctgtactggcacgtgaagaacaagcgggccctgctcgatgccctgccaatcgagatgctggacaggcatcatacccactcctgccccctggaaggcgagtcatggcaagactttctgcggaacaacgccaagtcataccgctgtgctctcctctcacatcgcgacggggctaaagtgcatctcggcacccgcccaacagagaaacagtacgaaaccctggaaaatcagctcgcgttcctgtgtcagcaaggcttctccctggagaacgcactgtacgctctgtccgccgtgggccactttacactgggctgcgtattggaggaacaggagcatcaagtagcaaaagaggaaagagagacacctaccaccgattctatgcccccacttctgaaacaagcaattgagctgttcgaccggcagggagccgaacctgccttccttttcggcctggaactaatcatatgtggcctggagaaacagctaaagtgcgaaagcggcgggccgaccgacgcccttgacgattttgacttagacatgctcccagccgatgcccttgacgactttgaccttgatatgctgcctgctgacgctcttgacgattttgaccttgacatgctccccgggtaa

SEQ ID NO: 74 - DNA, 2154 bp, artificial sequence
  PU.1-IRF8
atgttacaggcgtgcaaaatggaagggtttcccctcgtcccccctccatcagaagacctggtgccctatgacacggatctataccaacgccaaacgcacgagtattacccctatctcagcagtgatggggagagccatagcgaccattactgggacttccacccccaccacgtgcacagcgagttcgagagcttcgccgagaacaacttcacggagctccagagcgtgcagcccccgcagctgcagcagctctaccgccacatggagctggagcagatgcacgtcctcgatacccccatggtgccaccccatcccagtcttggccaccaggtctcctacctgccccggatgtgcctccagtacccatccctgtccccagcccagcccagctcagatgaggaggagggcgagcggcagagccccccactggaggtgtctgacggcgaggcggatggcctggagcccgggcctgggctcctgcctggggagacaggcagcaagaagaagatccgcctgtaccagttcctgttggacctgctccgcagcggcgacatgaaggacagcatctggtgggtggacaaggacaagggcaccttccagttctcgtccaagcacaaggaggcgctggcgcaccgctggggcatccagaagggcaaccgcaagaagatgacctaccagaagatggcgcgcgcgctgcgcaactacggcaagacgggcgaggtcaagaaggtgaagaagaagctcacctaccagttcagcggcgaagtgctgggccgcgggggcctggccgagcggcgccacccgccccacggatcgggagagggcaggggaagtcttctaacatgcggggacgtggaggaaaatcccggccccatgtgtgaccggaatggtggtcggcggcttcgacagtggctgatcgagcagattgacagtagcatgtatccaggactgatttgggagaatgaggagaagagcatgttccggatcccttggaaacacgctggcaagcaagattataatcaggaagtggatgcctccatttttaaggcctgggcagtttttaaagggaagtttaaagaaggggacaaagctgaaccagccacttggaagacgaggttacgctgtgctttgaataagagcccagattttgaggaagtgacggaccggtcccaactggacatttccgagccatacaaagtttaccgaattgttcctgaggaagagcaaaaatgcaaactaggcgtggcaactgctggctgcgtgaatgaagttacagagatggagtgcggtcgctctgaaatcgacgagctgatcaaggagccttctgtggacgattacatggggatgatcaaaaggagcccttccccgccggaggcctgtcggagtcagctccttccagactggtgggcgcagcagcccagcacaggcgtgccgctggtgacggggtacaccacctacgacgcgcaccattcagcattctcccagatggtgatcagcttctactatgggggcaagctggtgggccaggccaccaccacctgccccgagggctgccgcctgtccctgagccagcctgggctgcccggcaccaagctgtatgggcccgagggcctggagctggtgcgcttcccgccggccgacgccatccccagcgagcgacagaggcaggtgacgcggaagctgttcgggcacctggagcgcggggtgctgctgcacagcagccggcagggcgtgttcgtcaagcggctgtgccagggccgcgtgttctgcagcggcaacgccgtggtgtgcaaaggcaggcccaacaagctggagcgtgatgaggtggtccaggtcttcgacaccagccagttcttccgagagctgcagcagttctataacagccagggccggcttcctgacggcagggtggtgctgtgctttggggaagagtttccggatatggcccccttgcgctccaaactcattctcgtgcagattgagcagctgtatgtccggcaactggcagaagaggctgggaagagctgtggagccggctctgtgatgcaggcccccgaggagccgccgccagaccaggtcttccggatgtttccagatatttgtgcctcacaccagagatcatttttcagagaaaaccaacagatcaccgtctaa

SEQ ID NO: 75 - DNA, 2321 bp, artificial sequence
  PU.1-RUNX1
atgttacaggcgtgcaaaatggaagggtttcccctcgtcccccctccatcagaagacctggtgccctatgacacggatctataccaacgccaaacgcacgagtattacccctatctcagcagtgatggggagagccatagcgaccattactgggacttccacccccaccacgtgcacagcgagttcgagagcttcgccgagaacaacttcacggagctccagagcgtgcagcccccgcagctgcagcagctctaccgccacatggagctggagcagatgcacgtcctcgatacccccatggtgccaccccatcccagtcttggccaccaggtctcctacctgccccggatgtgcctccagtacccatccctgtccccagcccagcccagctcagatgaggaggagggcgagcggcagagccccccactggaggtgtctgacggcgaggcggatggcctggagcccgggcctgggctcctgcctggggagacaggcagcaagaagaagatccgcctgtaccagttcctgttggacctgctccgcagcggcgacatgaaggacagcatctggtgggtggacaaggacaagggcaccttccagttctcgtccaagcacaaggaggcgctggcgcaccgctggggcatccagaagggcaaccgcaagaagatgacctaccagaagatggcgcgcgcgctgcgcaactacggcaagacgggcgaggtcaagaaggtgaagaagaagctcacctaccagttcagcggcgaagtgctgggccgcgggggcctggccgagcggcgccacccgccccacggatcgggagagggcaggggaagtcttctaacatgcggggacgtggaggaaaatcccggccccatggcttcagacagcatatttgagtcatttccttcgtacccacagtgcttcatgagagaatgcatacttggaatgaatccttctagagacgtccacgatgccagcacgagccgccgcttcacgccgccttccaccgcgctgagcccaggcaagatgagcgaggcgttgccgctgggcgccccggacgccggcgctgccctggccggcaagctgaggagcggcgaccgcagcatggtggaggtgctggccgaccacccgggcgagctggtgcgcaccgacagccccaacttcctctgctccgtgctgcctacgcactggcgctgcaacaagaccctgcccatcgctttcaaggtggtggccctaggggatgttccagatggcactctggtcactgtgatggctggcaatgatgaaaactactcggctgagctgagaaatgctaccgcagccatgaagaaccaggttgcaagatttaatgacctcaggtttgtcggtcgaagtggaagagggaaaagcttcactctgaccatcactgtcttcacaaacccaccgcaagtcgccacctaccacagagccatcaaaatcacagtggatgggccccgagaacctcgaagacatcggcagaaactagatgatcagaccaagcccgggagcttgtccttttccgagcggctcagtgaactggagcagctgcggcgcacagccatgagggtcagcccacaccacccagcccccacgcccaaccctcgtgcctccctgaaccactccactgcctttaaccctcagcctcagagtcagatgcaggatacaaggcagatccaaccatccccaccgtggtcctacgatcagtcctaccaatacctgggatccattgcctctccttctgtgcacccagcaacgcccatttcacctggacgtgccagcggcatgacaaccctctctgcagaactttccagtcgactctcaacggcacccgacctgacagcgttcagcgacccgcgccagttccccgcgctgccctccatctccgacccccgcatgcactatccaggcgccttcacctactccccgacgccggtcacctcgggcatcggcatcggcatgtcggccatgggctcggccacgcgctaccacacctacctgccgccgccctaccccggctcgtcgcaagcgcagggaggcccgttccaagccagctcgccctcctaccacctgtactacggcgcctcggccggctcctaccagttctccatggtgggcggcgagcgctcgccgccgcgcatcctgccgccctgcaccaacgcctccaccggctccgcgctgctcaaccccagcctcccgaaccagagcgacgtggtggaggccgagggcagccacagcaactccccgaccaacatggcgccctccgcgcgcctggaggaggccgtgtggaggccctacaccggttg

SEQ ID NO: 76 - DNA, 1911 bp, artificial sequence
  PU.1-CEBPB
atgttacaggcgtgcaaaatggaagggtttcccctcgtcccccctccatcagaagacctggtgccctatgacacggatctataccaacgccaaacgcacgagtattacccctatctcagcagtgatggggagagccatagcgaccattactgggacttccacccccaccacgtgcacagcgagttcgagagcttcgccgagaacaacttcacggagctccagagcgtgcagcccccgcagctgcagcagctctaccgccacatggagctggagcagatgcacgtcctcgatacccccatggtgccaccccatcccagtcttggccaccaggtctcctacctgccccggatgtgcctccagtacccatccctgtccccagcccagcccagctcagatgaggaggagggcgagcggcagagccccccactggaggtgtctgacggcgaggcggatggcctggagcccgggcctgggctcctgcctggggagacaggcagcaagaagaagatccgcctgtaccagttcctgttggacctgctccgcagcggcgacatgaaggacagcatctggtgggtggacaaggacaagggcaccttccagttctcgtccaagcacaaggaggcgctggcgcaccgctggggcatccagaagggcaaccgcaagaagatgacctaccagaagatggcgcgcgcgctgcgcaactacggcaagacgggcgaggtcaagaaggtgaagaagaagctcacctaccagttcagcggcgaagtgctgggccgcgggggcctggccgagcggcgccacccgccccacggatcgggagagggcaggggaagtcttctaacatgcggggacgtggaggaaaatcccggccccatgcaacgcctggtggcctgggacccagcatgtctccccctgccgccgccgccgcctgcctttaaatccatggaagtggccaacttctactacgaggcggactgcttggctgctgcgtacggcggcaaggcggcccccgcggcgccccccgcggccagacccgggccgcgcccccccgccggcgagctgggcagcatcggcgaccacgagcgcgccatcgacttcagcccgtacctggagccgctgggcgcgccgcaggccccggcgcccgccacggccacggacaccttcgaggcggctccgcccgcgcccgcccccgcgcccgcctcctccgggcagcaccacgacttcctctccgacctcttctccgacgactacgggggcaagaactgcaagaagccggccgagtacggctacgtgagcctggggcgcctgggggccgccaagggcgcgctgcaccccggctgcttcgcgcccctgcacccaccgcccccgccgccgccgccgcccgccgagctcaaggcggagccgggcttcgagcccgcggactgcaagcggaaggaggaggccggggcgccgggcggcggcgcaggcatggcggcgggcttcccgtacgcgctgcgcgcttacctcggctaccaggcggtgccgagcggcagcagcgggagcctctccacgtcctcctcgtccagcccgcccggcacgccgagccccgctgacgccaaggcgcccccgaccgcctgctacgcgggggccgcgccggcgccctcgcaggtcaagagcaaggccaagaagaccgtggacaagcacagcgacgagtacaagatccggcgcgagcgcaacaacatcgccgtgcgcaagagccgcgacaaggccaagatgcgcaacctggagacgcagcacaaggtcctggagctcacggccgagaacgagcggctgcagaagaaggtggagcagctgtcgcgcgagctcagcaccctgcggaacttgttcaagcagctgcccgagcccctgctcgcctcctccggccactgctag

SEQ ID NO: 77 - DNA, 4848 bp, artificial sequence
  PU.1-SALL1
atgttacaggcgtgcaaaatggaagggtttcccctcgtcccccctccatcagaagacctggtgccctatgacacggatctataccaacgccaaacgcacgagtattacccctatctcagcagtgatggggagagccatagcgaccattactgggacttccacccccaccacgtgcacagcgagttcgagagcttcgccgagaacaacttcacggagctccagagcgtgcagcccccgcagctgcagcagctctaccgccacatggagctggagcagatgcacgtcctcgatacccccatggtgccaccccatcccagtcttggccaccaggtctcctacctgccccggatgtgcctccagtacccatccctgtccccagcccagcccagctcagatgaggaggagggcgagcggcagagccccccactggaggtgtctgacggcgaggcggatggcctggagcccgggcctgggctcctgcctggggagacaggcagcaagaagaagatccgcctgtaccagttcctgttggacctgctccgcagcggcgacatgaaggacagcatctggtgggtggacaaggacaagggcaccttccagttctcgtccaagcacaaggaggcgctggcgcaccgctggggcatccagaagggcaaccgcaagaagatgacctaccagaagatggcgcgcgcgctgcgcaactacggcaagacgggcgaggtcaagaaggtgaagaagaagctcacctaccagttcagcggcgaagtgctgggccgcgggggcctggccgagcggcgccacccgccccacggatcgggagagggcaggggaagtcttctaacatgcggggacgtggaggaaaatcccggccccatgtcgcggaggaagcaagcgaagcctcaacatttccaatccgaccccgaagtggcctcgctcccccggcgagatggagacacagaaaagggtcaaccgagtcgccctactaagagcaaggatgcccacgtctgtggccggtgctgtgccgagttctttgaattatcagatcttctgctccacaagaagaactgtactaaaaatcaattagttttaatcgtaaatgaaaatccagcctccccacccgaaaccttctcccccagcccccctcctgataatcctgatgaacaaatgaatgacacagttaacaaaacagatcaagtggactgcagcgacctttcagaacacaacggacttgacagggaagagtccatggaggtggaggccccggttgctaacaaaagcggcagcggcacttccagcggcagccacagcagtaccgccccaagcagcagcagcagcagcagcagcagcagcggcggcggcggcagctcctccacaggtacctcagcgatcacaacctctctacctcaactcggggacctgacaacactgggcaacttctccgtaatcaacagcaacgtcatcatcgagaacctccagagcaccaaggtggcggtggcccagttctcccaggaagcgaggtgcggcggggcctctgggggcaagctggccgtcccagccctcatggaacaactcctagctctgcagcagcagcagatccaccagctgcaattgatcgaacagattcgtcaccaaatattgctgttggcttctcagaatgcagacttgccaacatcttctagtccttctcaaggtactttacgaacatctgccaaccccttgtccacgctaagttcccatttatctcagcagctggcagcagcagctggattggcacagagcctcgccagccaatctgccagcattagtggtgtgaaacagctacccccaatccagctacctcagagcagttctggcaacaccatcattccatccaacagcggctcttctcccaatatgaacatattggcagcggcagttaccaccccgtcctctgaaaaagtggcttcaagtgctggggcctcccatgtcagcaacccagcggtctcatcatcgtcctcaccagcttttgcaataagcagtttattaagtcctgcgtctaatccacttctacctcagcaagcctccgctaactcggttttccccagccctttgcccaacatcggaacaactgcagaggatttaaactccttgtctgccttggcccagcaaagaaaaagcaagccaccaaatgtcactgcctttgaagcgaaaagtacttccgatgaggcattcttcaaacacaagtgcaggttctgcgcgaaggtctttgggagtgacagtgccttgcagatccacttgcgttcccataccggagagaggccattcaagtgcaacatctgcgggaacaggttctccaccaaggggaatctgaaagtccactttcagcgccacaaagagaaataccctcatatccagatgaacccctatcctgtgcctgagcatttggacaatatccccacgagtactggcatcccatatggcatgtccatccctccagagaagccagtcaccagctggctagacaccaaaccagtcctgcctactctgaccacttcagtcggcctgccgttgcccccaaccctcccaagcctcatacccttcatcaagacggaagagccagcccccatccccatcagccattctgccaccagccccccaggctcagtcaaaagtgactccgggggccctgagtcagccacaagaaacctaggtgggctcccagaggaagccgaagggtccactctgccaccctctggtggcaaaagcgaagagagtggcatggtcaccaactcagtcccgacggcgagcagtagcgtcctgagctccccagcggcagactgcggccccgcgggcagtgccaccaccttcaccaaccctttgttgccgctcatgtccgagcagttcaaggccaagtttccttttgggggactcctggactcagctcaggcatcagagacgtccaagcttcagcaactggtagaaaacattgacaagaaggccactgaccccaatgagtgcatcatctgccaccgggttctcagctgccagagcgccttgaaaatgcactacaggacacacactggggagaggccctttaagtgtaagatctgtggccgggctttcaccacgaaagggaatcttaaaacccactacagtgtccatcgtgctatgcccccgctcagagtccagcattcctgccccatctgccagaagaagttcacgaacgctgtggtcctgcagcagcacatccgaatgcatatgggaggccagatccccaacaccccagtccccgacagctactctgagtccatggagtctgacacaggttcctttgatgagaaaaattttgatgacctagacaacttctctgatgaaaacatggaagactgtcctgagggcagcatccctgatacacctaagtctgcagacgcctcccaagacagcttatcctcttcgcctttgcccctcgagatgtcgagcatcgctgctttggaaaatcagatgaagatgatcaatgctggcctggcagagcagctacaggccagcctgaagtcagtggagaatgggtccatcgagggggatgtcctgaccaatgattcatcctcagtgggtggtgacatggaaagccaaagtgctggcagcccagccatctcagagtctacctcttccatgcaggctctgtccccgtccaacagcacgcaggagttccacaagtcacccagcattgaggagaaaccacagagagcggtcccaagcgagtttgccaatggtttgtctcccaccccagtgaatggtggggctttggatttgacatctagtcacgcagagaaaatcatcaaagaagattctttggggatcctcttcccttttagagaccggggtaaatttaaaaacactgcttgtgacatttgtggcaaaacatttgcttgtcagagtgccttggacattcactatagaagtcataccaaagagagaccatttatttgcacagtttgcaatcgtggcttttccacaaagggtaatttgaagcagcacatgttgacacatcagatgcgagatctgccatcccagctctttgagcccagttccaaccttggccccaatcagaactcagcggtgattcccgccaactcgttgtcatctctcatcaagacagaggtcaacggcttcgtgcatgtttctcctcaggacagtaaggacacccccaccagtcacgtcccgtctgggcctctgtcttcctctgccacatccccagttctgctccctgctctgcccaggagaactcccaagcagcactactgcaacacatgtggcaaaaccttctcctcatcgagtgccctgcagattcacgagagaactcacactggagagaaaccctttgcttgcactatttgtggaagagctttcacgactaaaggcaatcttaaggtacacatgggcactcacatgtggaatagcacccctgcacgacggggtcggcggctctctgtggatggccccatgacatttctaggaggcaatcccgtcaagttcccagaaatgttccagaaggatttggcggcaagatcaggaagtggggatccttccagcttctggaatcagtatgcagcagcgctctccaacgggctggcgatgaaggccaacgagatctccgtcattcagaacggtggcatccctccaattcctggaagcctcggcagtgggaacagctcacctgttagtgggctgacgggaaacctggagaggctccagaactcagagcccaatgctcccctggccggcctggagaaaatggcaagcagtgagaacggaaccaacttccgcttcacccgcttcgtggaggacagcaaggagatcgtcacgagttaa

SEQ ID NO: 78 - DNA, 1083 bp, artificial sequence
  Oct4 CDS
atggcgggacacctggcttcggatttcgccttctcgccccctccaggtggtggaggtgatgggccaggggggccggagccgggctgggttgatcctcggacctggctaagcttccaaggccctcctggagggccaggaatcgggccgggggttgggccaggctctgaggtgtgggggattcccccatgccccccgccgtatgagttctgtggggggatggcgtactgtgggccccaggttggagtggggctagtgccccaaggcggcttggagacctctcagcctgagggcgaagcaggagtcggggtggagagcaactccgatggggcctccccggagccctgcaccgtcacccctggtgccgtgaagctggagaaggagaagctggagcaaaacccggaggagtcccaggacatcaaagctctgcagaaagaactcgagcaatttgccaagctcctgaagcagaagaggatcaccctgggatatacacaggccgatgtggggctcaccctgggggttctatttgggaaggtattcagccaaacgaccatctgccgctttgaggctctgcagcttagcttcaagaacatgtgtaagctgcggcccttgctgcagaagtgggtggaggaagctgacaacaatgaaaatcttcaggagatatgcaaagcagaaaccctcgtgcaggcccgaaagagaaagcgaaccagtatcgagaaccgagtgagaggcaacctggagaatttgttcctgcagtgcccgaaacccacactgcagcagatcagccacatcgcccagcagcttgggctcgagaaggatgtggtccgagtgtggttctgtaaccggcgccagaagggcaagcgatcaagcagcgactatgcacaacgagaggattttgaggctgctgggtctcctttctcagggggaccagtgtcctttcctctggccccagggccccattttggtaccccaggctatgggagccctcacttcactgcactgtactcctcggtccctttccctgagggggaagcctttccccctgtctccgtcaccactctgggctctcccatgcattcaaactga

SEQ ID NO: 79 - DNA, 918 bp, artificial sequence
  Nanog CDS
atgagtgtggatccagcttgtccccaaagcttgccttgctttgaagcatccgactgtaaagaatcttcacctatgcctgtgatttgtgggcctgaagaaaactatccatccttgcaaatgtcttctgctgagatgcctcacacggagactgtctctcctcttccttcctccatggatctgcttattcaggacagccctgattcttccaccagtcccaaaggcaaacaacccacttctgcagagaagagtgtcgcaaaaaaggaagacaaggtcccggtcaagaaacagaagaccagaactgtgttctcttccacccagctgtgtgtactcaatgatagatttcagagacagaaatacctcagcctccagcagatgcaagaactctccaacatcctgaacctcagctacaaacaggtgaagacctggttccagaaccagagaatgaaatctaagaggtggcagaaaaacaactggccgaagaatagcaatggtgtgacgcagaaggcctcagcacctacctaccccagcctttactcttcctaccaccagggatgcctggtgaacccgactgggaaccttccaatgtggagcaaccagacctggaacaattcaacctggagcaaccagacccagaacatccagtcctggagcaaccactcctggaacactcagacctggtgcacccaatcctggaacaatcaggcctggaacagtcccttctataactgtggagaggaatctctgcagtcctgcatgcagttccagccaaattctcctgccagtgacttggaggctgccttggaagctgctggggaaggccttaatgtaatacagcagaccactaggtattttagtactccacaaaccatggatttattcctaaactactccatgaacatgcaacctgaagacgtgtga

SEQ ID NO: 80 - DNA, 20 bp, artificial sequence
  SPI1 total forward primer
ccccctccatcagaagacct

SEQ ID NO: 81 - DNA, 20 bp, artificial sequence
  SPI1 total reverse primer
aagtcccagtaatggtcgct

SEQ ID NO: 82 - DNA, 20 bp, artificial sequence
  SPI1 endo forward primer
cctgcaatgtcaagggaggg

SEQ ID NO: 83 - DNA, 19 bp, artificial sequence
  SPI1 endo reverse primer
ccaatgcagagcccctcag

SEQ ID NO: 84 - DNA, 20 bp, artificial sequence
  CEBPB total forward primer
gacgagtacaagatccggcg

SEQ ID NO: 85 - DNA, 20 bp, artificial sequence
  CEBPB total reverse primer
acagctgctccaccttcttc

SEQ ID NO: 86 - DNA, 20 bp, artificial sequence
  CEBPB endo forward primer
gggagcccgtcggtaatttt

SEQ ID NO: 87 - DNA, 20 bp, artificial sequence
  CEBPB endo reverse primer
catgtgcggttggtttggac

1. A method for the production of: microglia from stem cells, comprising the steps of:
a) targeted insertion of a nucleotide sequence encoding a transcriptional regulator protein into a first genomic safe harbour site; and
b) targeted insertion of the coding sequence of the transcription factor PU.1 (SEQ ID NO: 1) into a second genomic safe harbour site, wherein the gene is operably linked to an inducible promoter, which is regulated by the transcriptional regulator protein; expression of PU.1 (SEQ ID NO: 2); and
c) culturing the stem cells received from steps a) and b) with exposure to at least one growth factor or small molecule that recapitulates signaling during at least one stage of embryonic development of microglia or adult microglia proliferation, differentiation or polarization.

2. Method according to claim 1, wherein the at least one growth factor or small molecule is selected from the group consisting of Activin A (SEQ ID NO: 7), BMP4 (SEQ ID NO: 8), FGF (SEQ ID NO: 9), VEGF-A (SEQ ID NO: 10), LY294002, CHIR99021, SCF (SEQ ID NO: 11), IL-3 (SEQ ID NO: 12), IL-6 (SEQ ID NO: 13), CSF1 (SEQ ID NO: 14), IL-34 (SEQ ID NO: 15), CSF2 (SEQ ID NO: 16), CD200 (SEQ ID NO: 17), CX3CL1 (SEQ ID NO: 18), TGFβ1 (SEQ ID NO: 19), and IDE1.

3. Method according to claim 1 or 2, wherein the at least one growth factor is CSF1 (SEQ ID NO: 14) or IL-34 (SEQ ID NO: 15).

4. Method according to any one of the previous claims, wherein the at least one small molecule is CHIR99021, LY294002 or IDE1.

5. Method according to any one of the previous claims, wherein the first and the second genomic safe harbour sites are different.

6. Method of any one of the previous claims, further comprising insertion of the coding sequence of the gene of the transcription factor CEBPB (SEQ ID NO: 3) and expression thereof.

7. Method of any one of the previous claims, further comprising insertion of the coding sequence of the gene of the transcription factor RUNX1 (SEQ ID NO: 4) and expression thereof.

8. Method of any one of the previous claims, further comprising insertion of the coding sequence of the gene of the transcription factor IRF8 (SEQ ID NO: 5) and expression thereof.

9. Method of any one of the previous claims, further comprising insertion of the coding sequence of the gene of the transcription factor SALL1 (SEQ ID NO: 6) and expression thereof.

10. Method of any one of the previous claims, wherein the transcriptional regulator protein is the reverse tetracycline transactivator (rtTA) (SEQ ID NO: 20) and the activity thereof is controlled by doxycycline or tetracycline.

11. Method of any one of the previous claims, wherein the inducible promoter includes a Tet Responsive Element (TRE) (SEQ ID NO: 21).

12. Method of any one of the previous claims, wherein said first and said second genomic safe harbour sites are selected from the group consisting of the hROSA26 locus (SEQ ID NO: 22), the AAVS1 locus (SEQ ID NO: 23), the CLYBL gene (SEQ ID NO: 24), the CCR5 gene (SEQ ID NO. 25), the HPRT gene (SEQ ID NO. 26) or genes with the site ID 325 on chromosome 8 (SEQ ID NO: 27), site ID 227 on chromosome 1 (SEQ ID NO: 28), site ID 229 on chromosome 2 (SEQ ID NO: 29), site ID 255 on chromosome 5 (SEQ ID NO: 30), site ID 259 on chromosome 14 (SEQ ID NO: 31), site ID 263 on chromosome X (SEQ ID NO: 32), site ID 303 on chromosome 2 (SEQ ID NO: 33), site ID 231 on chromosome 4 (SEQ ID NO: 34), site ID 315 on chromosome 5 (SEQ ID NO: 35), site ID 307 on chromosome 16 (SEQ ID NO: 36), site ID 285 on chromosome 6 (SEQ ID NO: 37), site ID 233 on chromosome 6 (SEQ ID NO: 38), site ID 311 on chromosome 134 (SEQ ID NO: 39), site ID 301 on chromosome 7 (SEQ ID NO: 40), site ID 293 on chromosome 8 (SEQ ID NO: 41), site ID 319 on chromosome 11 (SEQ ID NO: 42), site ID 329 on chromosome 12 (SEQ ID NO: 43) and site ID 313 on chromosome X (SEQ ID NO: 44).

13. Method of any one of the previous claims, wherein said stem cell is a pluripotent stem cell, an induced pluripotent stem cell (iPSC), a neural progenitor cell, hematopoietic stem cell or an embryonic stem cell (ESC).

14. Method of any one of the previous claims, wherein said stem cell is a human or a mouse stem cell.

15. A microglia obtained by any one of the methods according to claims 1 to 14, preferably wherein the microglia expresses at least one microglia surface protein selected from the group consisting of ITGAM (CD11B) (SEQ ID NO: 45), ITGAX (CD11C) (SEQ ID NO: 46), CD14 (SEQ ID NO: 47), CD16 (SEQ ID NO: 48), ENTPD1 (CD39) (SEQ ID NO: 49), PTPRC (CD45) (SEQ ID NO: 50), CD68 (SEQ ID NO: 51), CSF1R (CD115) (SEQ ID NO: 52), CD163 (SEQ ID NO: 53), CX3CR1 (SEQ ID NO: 54), TREM2 (SEQ ID NO: 55), P2RY12 (SEQ ID NO: 56), TMEM119 (SEQ ID NO: 57), and HLA-DR (SEQ ID NO: 58).

16. Microglia according to claim 15 for use in therapy.

17. Use of microglia according to claim 15 or 16 for in vitro diagnostics of a disease.

18. Use of microglia according to claim 17, wherein the disease is selected from the group consisting of diseases of the central nervous system, preferably neurodegenerative diseases; more preferably Alzheimer's disease, Parkinson's disease, frontotemporal dementia or Amyotrophic Lateral Sclerosis; neuroinflammatory or autoimmune diseases, preferably Multiple Sclerosis, auto-antibody-mediated encephalitis or infectious diseases, neurovascular diseases; preferably stroke, vasculitis; traumatic brain injury, and cancer.

19. Use of microglia according to claim 15 or 16 for in vitro culturing with brain organoids.
